(19) United States
(12) Patent Application Publication
(10) Pub. No.: US 2002/0132090 A1
(43) Pub. Date: Sep. 19, 2002

(54) Method of making a single-cell window covering

(75) Inventor: John A. Corey, Melrose, NY (US)

Correspondence Address: RADER, FISHMAN & GRAUER PLLC, 39533 WOODWARD AVENUE, SUITE 140, BLOOMFIELD HILLS, MI, 48304-0610, US

(73) Assignee: Comfortex Corporation

(21) Appl. No.: 09/833,381

(22) Filed: Apr. 11, 2001

Related U.S. Application Data
(60) Provisional application No. 60/197,063, filed on Apr. 13, 2000.

(51) Int. Cl. B32B 3/12

(52) U.S. Cl. 428/116

(57) ABSTRACT

A method of forming a single-cell column type of multi-cellular collapsible window covering from a starting product in the form of a double-cell column type of multi-cellular honeycomb structure. The individual cells of the starting product are defined by external pleated sides on the opposite faces of the structure and internal ligaments interconnecting the opposite faces at spaced intervals. Selected internal ligaments are severed, while leaving others of the internal ligaments intact, thereby eliminating one of the original columns of cells.

### CROSS NOTING TO RELATED APPLICATIONS

[0001] This application claims the benefit of provisional patent application Serial No. 60/197,063, filed on Apr. 13, 2000.

### BACKGROUND OF THE INVENTION

[0002] 1. Field of the Invention

[0003] This invention relates to an improved method for making single-cell honeycomb type window coverings.

[0004] 2. Description of the Related Art

[0005] In the past, single-cell honeycomb type window coverings have been made by a variety of techniques. One technique, disclosed in U.S. Pat. No. 4,450,027 to Colson, involves folding a continuous strip of fabric into a tube, applying adhesive to the exterior of the tube and then winding the tube onto a rotating rack so that the adjacent windings of the stacked tube are bonded together to form a honeycomb array or stack of cells of single-cell thickness. Another technique, disclosed in U.S. Pat. No. 4,288,485 to Suominen and U.S. Pat. No. 5,630,898 to Judkins, cuts through the full depth of a collapsed multiple-cell width honeycomb array of cells to remove a single-cell width column of cells.

### SUMMARY OF THE INVENTION

[0006] The method of the present invention begins with a previously formed multiple-cell width honeycomb array of cells. Only selected internal ligaments are severed to form either a single-cell width product or a product wherein the stack of cells includes both multiple-cell width portions and single-cell width portions.

### BRIEF DESCRIPTION OF THE DRAWINGS

[0007] FIG. 1 is an illustration of the prior art disclosed by Corey et al.

[0008] FIGS. 2a and 2b illustrate a plan view of the product of FIG. 1 after the internal ligaments have been severed in accordance with a first embodiment of the invention.

[0009] FIGS. 3a and 3b illustrate a plan view of the product of FIG. 1 after the internal ligaments have been severed in accordance with a first alternate embodiment of the invention.

[0010] FIGS. 4a and 4b illustrate a plan view of the product of FIG. 1 after the internal ligaments have been severed in accordance with a second alternate embodiment of the invention.

[0011] FIGS. 5a and 5b illustrate a plan view of the product of FIG. 1 after the internal ligaments have been severed in accordance with a third alternate embodiment of the invention.

[0012] FIGS. 6a and 6b illustrate a plan view of the product of FIG. 1 after the internal ligaments have been severed in accordance with a fourth alternate embodiment of the invention.

[0013] FIGS. 7a and 7b illustrate a plan view of the product of FIG. 1 after the internal ligaments have been severed in accordance with a fifth alternate embodiment of the invention.

[0014] FIGS. 8 and 9 illustrate a means for severing the ligaments in accordance with the invention.

### DESCRIPTION OF THE PREFERRED EMBODIMENT

[0015] In the preferred embodiment of the invention, the starting product is a multiple-cell width honeycomb array of cells formed by the process disclosed in U.S. Pat. No. 5,193,601 to Corey et al., the entire contents of which is herein incorporated by reference. The process disclosed in the '601 patent results in the multiple-cell width honeycomb, collapsible, fabric product 10 shown, in simplified example form, in FIG. 1.

[0016] As shown in FIG. 1, the starting product 10 is illustrated in a Type 1:1 configuration. The reader may readily see that passing an imaginary horizontal plane (of the Type 1:1) through a bonding or glue line 12 (shown schematically as a circle) and crease 14, a single cell C will be traversed, passing through the crease 14. Passing a second imaginary plane through an adjacent glue line 12 and crease 14 will traverse, again, a singular cell C. Thus, this type of configuration is 1:1.

[0017] The reader is advised in the manner of making the starting product 10 of FIG. 1. As described in the '601 patent, the process of making the staring product 10 begins with a web, i.e., a continuous fabric, a single adhesive stripe is applied between each pre-established index for a fold, substantially closer to the open side of the proposed fold than the closed side. In appearance, a pair of adhesive stripes straddles a crease, each line equidistant from the crease and on the surface of the web that will be exposed to view. The flexibility of the web material and the functioning of fold lines or creases as permanent hinge lines permit the tubular cells to be readily and non-destructively collapsed and expanded along an axis parallel to the length of the original web as the window covering is raised and lowered, respectively, during use. Pleated sides or external ligaments a are parts of the web appearing between bonding lines 12 and creases 14; and internal ligaments b are ligaments of the web appearing only between bonding lines 12. The term “line” is used simply because, to the untrained eye, the adhesive appears to be nothing more than a (barely) discernible line of a coating material. But, it is the character of appropriate adhesives to stiffen when fully cured and thereby impart to the web an integral, transverse structural element.

[0018] FIG. 2a shows the starting product 10 of FIG. 1 after selected internal ligaments b have been severed. Specifically, alternate internal ligaments b_{2, 4} are severed, resulting in the uniform-pitch finished product 10 of FIG. 2b. In this embodiment, each cell has only a single pleat on each face. The process FIG. 2a is presently preferred, because the resulting product of FIG. 2a has pleated faces of uniform pitch. It will be apparent that the severed internal ligaments b may either be the “descending” internal ligaments b_{2, 4}, as shown in FIG. 2a, or the “ascending” internal ligaments b_{1, 3, 5}, provided that only alternating internal ligaments are severed.

[0019] A first alternative embodiment is shown in FIG. 3a, wherein three consecutive, adjacent internal ligaments b_{2, 3, 4} are severed, leaving every fourth internal ligament b_{1, 5} intact. In other words, every internal ligament b is severed, except every fourth internal ligament b_{1, 5} is left intact. This sequence results in the finished product 10 of FIG. 3b. As evident from FIG. 3b, each cell has two pleats on each face.

[0020] Other alternatives result in pleated faces having non-uniform pitch, which may not be preferred for aesthetic reasons. In the method of FIG. 4a, the sequence is to cut one internal ligament b₂, leave the next three internal ligaments b_{3, 4, 5} intact, etc. In other words, every fourth internal ligament b_{2, 6} is severed. This sequence results in the finished product 10 of FIG. 4b, wherein each face has a single pleat per cell, but the pleats have an alternating variable pitch resulting from the inclusion of a pair of the original, unmodified, double-cell cells remaining between each newly formed single-cell.

[0021] A further modification involves a variation of the cut one internal ligament, leave three, cut one, leave three sequence, etc. of FIG. 4a. In FIG. 5a, the sequence is to cut one internal ligament b₆, leave one internal ligament b₇ intact, cut one internal ligament b₈, leave the next three internal ligaments b_{9, 10, 11} intact, etc. This sequence results in the finished product 10 of FIG. 5b, wherein two adjacent single-cells (rather than only one single-cell as in FIG. 4b) appear between each original double-cell.

[0022] Another alternative method is shown in FIG. 6a, involving the simple alternating sequence of cut one internal ligament b₂, leave two internal ligaments b_{3, 4}, cut another internal ligament b₅, leave two internal ligaments b_{6, 7}, cut another internal ligament b₈, leave two internal ligaments b_{9, 10}, etc. In other words, every third internal ligament b_{2, 5, 8} is severed. This sequence results in the finished product 10 of FIG. 6b, wherein only half of an original double-cell pair appears between each newly formed single-cell, and such half double-cells appear on alternating faces of the finished product 10.

[0023] Still another alternative method is shown in FIG. 7a, involving the simple alternating sequence of cut two internal ligaments b_{2,3}, leave one internal ligament b₄, cut two internal ligaments b_{5,6}, leave one internal ligament b₇, cut two internal ligaments b_{8,9}, etc. In other words, every internal ligament is severed, except every third internal ligament is left intact. This sequence results in the finished product 10 of FIG. 7b, wherein each newly formed cell has a single pleat on one face and a double pleat on the opposite face, and such cells are oriented in alternating opposite directions.

[0024] The location of the glue lines 12 shown in the accompanying drawings is such that they are spaced apart from each other at approximately the one-third and two-third points in the width of the flattened product, i.e., as viewed in the accompanying drawings. The fact that ligaments b are to be severed in accordance with the processes of the present invention, the product 10 may be designed so that the internal ligaments b are initially made shorter than the width of the product 10. For example, the internal ligaments b can be made shorter than one-third the width of the product 10. This modified configuration can be accomplished by decreasing the spacing between the glue lines 12 of each ligament-defining pair.

[0025] Referring now to FIGS. 8 and 9, the severing of the desired internal ligaments b is accomplished by advancing a cutting means, such as a knife blade, shown generally at 80, through the longitudinal length of the product 10. The knife blade 80 includes a blade 82 that is mounted at an angle 84 between a pilot finger 86 and a guard finger 88. Preferably, the pilot finger 86 projects further ahead of the knife blade 80 than the guard finger 88. The knife blade 80 can be mounted on the end of a rod 90 that is preferably actuated by a reciprocating means (not shown).

[0026] The knife blade 82 is advanced toward and into the cellular structure of the product 10, its path being substantially parallel to the longitudinal axis L of the cells. The pilot and guard fingers 86, 88 of the knife blade 80 straddle the desired ligament or septum to be cut. The cross-sectional dimensions of the pilot finger 86 and blade 82 are selected relative to the cell perimeter to assure that the cell entered by the pilot finger 86 goes tight (or flat) over the exposed blade 82, to assure proper severing of the desired ligament. It is contemplated that two properly spaced knife blades may be mounted on the reciprocating means, so that, in the case of the embodiment of FIG. 2 (where alternating ligaments are severed), two ligaments may be severed by a single stroke of the two-blade cutting means. Following the cutting and withdrawing strokes of the knife blades, the product 10 could be indexed the appropriate distance to bring the next pair of ligaments to be cut into proper alignment with the reciprocation path of the cutting blades of the two-blade cutting means.

[0027] As an alternative to severing the desired ligaments b by cutting, as disclosed above, it may be desirable to establish pre-weakened severance lines in the desired locations, as by perforating the fabric, preferably prior to the pleating step. Thus, when the pleated, glued, and cured product is complete, it may be expanded in a direction to expand the cells to the point that the ligaments, which go tight first because of their length relative to that of the pleated faces, will be tensioned sufficiently to break or separate along the pre-perforated lines.

[0028] As will be understood by those skilled in the art, other sequences or patterns of cutting can be conceived without departing from the present concept of cutting the selected internal ligaments described above. For example, the principles of the invention can be applied to a starting product that is a multi-celled column type window covering.

[0029] While the invention has been specifically described in connection with certain specific embodiments thereof, it is to be understood that this is by way of illustration and not of limitation, and the scope of the appended claims should be construed as broadly as the prior art will permit.

The application's sequence listing, which the Patent Office published only in electronic form, follows.

SEQUENCE LISTING (2050 sequences)

SEQ ID NO: 1 - DNA, 340 bp, Homo sapiens
  misc_feature (1)...(340): n = A,T,C or G
acacgacgatcaatggtcgtnatgagattgtcggttttnaagttgccatggccaagcaacttgccaaagatttaggcgttaagatgcaaatcaaggaaatgggctttgatggtttaatcggcgcgttgcaaacgggtaagattgacgtcattatttctggtattaatgcgacgccagancgtgaacaggtggtggccttttcaaaaccttacatgtcaccgaaacaaacggtgttgattctcaagaaaaatgccccacagtttacgactgatgtgagttcttttgcgggtaaagaaggttggggcgcaacgccaaacaacccaagagacatttgtgcaag

SEQ ID NO: 2 - DNA, 280 bp, Homo sapiens
  misc_feature (1)...(280): n = A,T,C or G
gggttatttggtctgatgaataccaaaacagggacaccagaaggctttgacgtcgatattgccaaagccttgacggtgcaaatttcaaaacaaactggcgtgccaatgtcagcacaatttatcccagtatcagcatctnctaagatgcagctgttgaagaacactaatattgatggctctgtctcaacgatgacgattacgccagancgtgaaaagattattgactttnccangccatattttgacgccggacaatcaatcttggtgaaaaaaagactct

SEQ ID NO: 3 - DNA, 775 bp, Homo sapiens
  misc_feature (1)...(775): n = A,T,C or G
tttgttactgattttagaaacagtattaagcaccttgttgttttgtttctgttttcaaggaatgcagattctactaagatctccttgcaaaatgaatgcatttaattttccctatgtgtttttcctctgcaggtagttttcccaagagtggctcaggtttgtaagaatgatatgggaggatctcaaagagtcctggagaaacagtggacgtcgttcctgaaggcgcgcttgaactgctcagttcctggagactctcatttttatttcaacattctccaggcagttacagatgtgattcgtatcaacgggcgtgatgttgtcctggcaacgttttctacaccttataacaggtaatcatgccctagctgtgttgacctcatcaattcttcctggcttccttctcccagggggttctcttctaataaaccatatttgcaactggacttgaaaattgcattcattgtgtgtaggctaaggaaggcaccttaacacttaggttttccatcaacaaattaaaagtagtttataagcactattaagttaggttttaggggaagtaattagataaattatgacaatatcttttatttatataancctggtatataaacactttttatgtgttatttataaatccttctagtaatcctagaaactagataatattgtcttctttttccacttaaggaaagtgagctcgacatattatactacctggtctaagtagtcagtagatggaagaggcaagtttggaactcaagaatgttcgtcctgt

SEQ ID NO: 4 - DNA, 129 bp, Homo sapiens
acattgacgagtgtgagaatgactactacaatgggggctgtgtccacgagtgcatcaacatcccggggaactacaggtgtacctgctttgatggcttcatgctggcacacgatggacacaactgcctgg

SEQ ID NO: 5 - DNA, 332 bp, Homo sapiens
cctccattctggcatggattcgaaaggcattcatttttgtccacttcacagttgatgccaacccagcctgcatcacagagacacttatatccactgagacctccagtacagtttccatggatgcagggattgctcaggcattcgttcacctgtgagtagcagctggggtgatggggtccctcggggcatatacagcggaaaccattcacaccgttgatacatgttgcacccttgcgacagggattggaggcacactcatcaatgtcaatgttacatctctggcctgtgaaatcctggtgagcagacacaactgtagcgattaattgccatcc

SEQ ID NO: 6 - DNA, 302 bp, Homo sapiens
  misc_feature (1)...(302): n = A,T,C or G
ttttttttntccacttcacagttgatgccaacccagcctgcatcacagagacacttatatccactgagacctccagtacagtttccatggatgcagggattgcncaggcattcgttcacctgtnagtagcagctggggtgatggggtccctcggggcatatacagcggaaaccattcacaccgttgatacatgtngcacccttgcgacagggattggnggcacactcatcaatgtcaatgttacatctctggcctgtgaaatcctggtgagcagacacaactgtagcgattaattgccatcc

SEQ ID NO: 7 - DNA, 318 bp, Homo sapiens
  misc_feature (1)...(318): n = A,T,C or G
caggcacaggcagcctcagaaattgctgtagggcaccagtataagcatcagatctttcctccccagagctggaagttggcgctggtggctgccatgatgagtggcattgcagttgtnttggccatggcaccctttgatgtggcctgcacaaggctctacaaccagcccacagatgcacagggcaagggcctcatgtaccgggggatactggacgctctgctgcagacagcttcggaccgagggcattttttggcatgtacaagggtattaggtgcctcctacttccgncttggccccaanaccatcctttcccttttt

SEQ ID NO: 8 - DNA, 1155 bp, Homo sapiens
tttttttttttcagaataaacttgctttataatcaatataatctctgtgcctttgaatctaacaggacacctgggtcccagacgcctgggaattgggtctctcaattccctttggttttggagggaggagtttaaaactgtgcatgggagcaggagggactcaagggtggcagtggtgagtgggaggaaatacactttgggatgactcgttcagccctgagagaggggtgtgagttacccagggaatgggtagggaaggtttaaagcaacacccaaggaaagaagggaaactcatctcttgtagtgattcaaccctgagaacagatggggagtggggttggctgtcccccatggatggatgaaaggtcacctaatcagtagtcaccaggacatagtggtggaggcacaagtggccaaggagtgctcatttggtggagactgggaaagcggctgttatttagtgtctgtgtagtagagggagcgcagctggtcccagaagaagagggagaggatggtgtggtggccgaggcggaagtaggaggcacctatacccttgtacatgccaaaaatgccctcggtccgagctgtctgcagcagagcgtacagtatccctcggtacatgaggcccttgccctgtgcatctgtgcggctggttgtagagccttgtgcaggccacatcaaagggtgccatggccaagacaactgcaatgccactcatcatggcagccaccagcgccaacttccaagcttcttggggaggaaagatctcccactggctcaggaggtccttggtggatgagaaggtcacagctgggtggaggaaccgacgataactcggggcaggccgccccagagccccacgcccataaccccaaccagaccatgtttctggcccaatctcggttagcgccctgaaaacatgccctgatgcttatactggtgccctacagcaatttctgaggctgcctgtgcctgcaggtgtgtcttcaccatgtagatggggctccccaagtaggctcccatgaccccagccatggccccagctgtgcgctgcgggcaggactgctgggctgttcggctgtgtgcaggtagcccccagcctcagccagcccataggtgcccagtcggatgccattcatcaggaactggtacaag

SEQ ID NO: 9 - DNA, 427 bp, Homo sapiens
  misc_feature (1)...(427): n = A,T,C or G
accttctgtcttttgcccctccttgacctcagagggtcctgccttaagcttctcaccagaatctcctagatttctatctcttccctgcttgccagctcttgactcccaaattccagctgacgtttgaccacttgacatttgaccctgacacccttgactgcaaatctaaattcttatcttctgcaacctgtactgctgaaacaggccttccccctgtcttccaaccccgctttctgacacccatttttactttcttactcttgggtcagttcctgctacagctatcccaccatggacttcttgatgagtggcctggcagcctgcggggcctgtgtattcaccaatcccctggaggtggtgaagacaggatgcagttnaaggagaatgcaggccctgnacataccagcggnctacgaaatgnttcatg

SEQ ID NO: 10 - DNA, 697 bp, Homo sapiens
  misc_feature (1)...(697): n = A,T,C or G
aaagagacagggtctcactctgttgcccaggctggagtgcagtgctgcaatcatagctcactgtagccttaaactcctgggctcaagcgatcctcccacctcagcctcccaagtagctgggactacaggcgtccaccattacactcagctaatttttcaattctttttctgtcttctgattccctccattttgacgtgcaatgggcaatgaagcgtgcagaatggatcatgaactgaagaatgtcatgtgaatactaaagagaattcatgatcaccacctgacaaacacttagtttcggctttgtatttgaaacatgaaaccaagaaattgtttcctaatctgaatgaagcctaacttctgaaactaggcctagagacagctgatttatgagcttaaggtctctaaaccaacaatgacacacagtaggtgttttttacaagctccctaagattttcggcactaactgcaggacaaagaacagctaggctaaacatttaagaaaagacacataagatctaaaaaaaactaaataaaacttctttaaattaccacaaaactaaaataaaacacataataacctcattaaacacttgagcattactgaatggaattcaggaaaatctaatacagactacctcaaaaatacatgcttgtaggaacactgaccccatttctctggagtctctttcccantta

SEQ ID NO: 11 - DNA, 1161 bp, Homo sapiens
ggatacttggtcaggacctggtggctttaccagatgatcctctccacagtgactgtcccctttatcctgtgctgttgggtgctcccagagacacctttttggcttctctcagagggacgatatgaagaagcacaaaaaaatagttgacatcatggccaagtggaacagggcaagctcctgtaaactgtcagaacttttatcactggacctacaaggtctgttagtaatagccccactgaagttcagaagcacaacctatcatatctgttttataactggagcattacgaaaaggacacttaccgtttggctaatctggttcactggaagtttgggattctactcgttttccttgaattctgttaacttaggaggcaatgaatacttaaacctcttcctcctgggtgtagtggaaattcccgcctacaccttcgtgtgcatcgccatgggacaaggtcgggaggagaacagtcctgggcctactctcttttctgccagtgcactggcctgtggtgttcgttatggtgatcccccagaaacattatattttgggtgtgggttgacagctatggttgggaaaattttgccatcggggcagcatttgggcctcatttatctttatacagctgagctgtattcaaccattataagatcgctggctgtgggaagcggcagcatggtgtgtcgcatggccagcatcatgacgccgttctctgtggacctcagcagcatttgaatctacataccacagttgtttgttgggactatggccctcctgagttgagtgttaacactaaagcttccagaaacccttgggaaacggactagcaactaacttgggaggaggctgcaaaactggagtcagagaatgaaagcaagtcaagcaaattacttctcacaactaataatagtgggctggaaaaaacggaagcgattacccccagggattctggtcttggtgaataaatgtgccatgcctgctgtctagcacctgaaatattatttaccctaatgcctttgtattagaggaatcttattctcatctcccatatgttgtttgtatgtctttttaataaattttgtaagaaaattttaaagcaaatatgttataaaagaaataaaaaataagacgaaaaaaaaaaattttaaaaaaaaaaaaaaa

SEQ ID NO: 12 - DNA, 939 bp, Homo sapiens
tttttttttttgcgttaatacaatgatgttatttttatttggatagtatttgtatgattggaaatgagtgttaatctttatatgtattttaccagtccttgactaacatgttttcaagacatcttaccaatccatttcattgaattaatgagtaaggagactctctagaaatggttggtttgtaaagcaaggacattatctggaagaatcatccagagtttactgtatgacgagcatttcttgatagcaaggttcattttggtgtcaatcgttacagtcagtccatttcagtgggaacaacgaatttctccacagggtcttatttttctgtttttcacttcaccaaatggggtagatattttttcagaatgcagttattagaaccttgggattttcttctgtctccattgagtctcttgtttttttcccagatctgaaccatttcactttctgcatctgctctaaggtttctggaagagtcattccccaaactttcagggaaaaaaagggtgaggattccaatcaggacagtcagactacccatgacgatgtagggccagcattctgttgtaaagcaccgaggtaaacaaagttagggggcaatgatgctccccactctggaggccgtggatgtgacccccaccgccatgttcctgaccagggttgggtagagctcagcagtgaagacatacagcatggagaaagcagaggtgatcccaaattttcccagcatgaccagaccaatggataagaagtaataatccacaggtaccagttgaatgaagagaagcacacctcctccccagaacagtactgcagctatgatataacgcctgggcacgttcgcaatagcagccaggctgtaatgtaagctggaatttcaatcaaggcagagaggaaacagttcaggtaggcatctccatgtaaattaggagcatc

SEQ ID NO: 13 - DNA, 389 bp, Homo sapiens
gagaagaaccctgaaatcagaccagtttttgcggcctccccctttcctctctgttacagtgccctttccaggccttaagagaagtaaaacttagctgcagcgtcaggaggtggaccccagagtgtgagtggcacgcttctctgtgaacccgtcctcaccatgtttgccacatctggggcagtggcagcggggaagccttactcgtgcagcgaatgtggcaagagcttctgctacagctcagtgctgctgcgacatgaacgagctcacggcgtgacgcgcttccgttgcctagaatgcggtgacgctgtgcacgggctgctgacctccgagcgcacaggcacgcatgctggccagaccctctacatctgcagtgagtgcggacaaagctt

SEQ ID NO: 14 - DNA, 503 bp, Homo sapiens
  misc_feature (1)...(503): n = A,T,C or G
ggaagttgagctttgccgatgaggtgaccacatcccctgtcctgggcctgaagatcaaggaggaggagcccggagcgccgtcccggggcttggggggcagccgcacgccactgggggagttcatctgccagctgtgcaaggagcagtacgcagaccccttcgcgctggcccagcaccgctgctcccgcatcgtgcgcgtagagtaccgctgccctgagtgcgacaaggtgttcagctgtcctgcgaacctggcctcccatcgccgctggcataagccgcgtcctgcgtgncaaacgccgccacagtctcctccgccgacgggaagccgccttcttcgtcgtcttcgtcctcccgggactccggggccattgcatcttttctggcggagggaaaggagaacagccgaatagagcggactgcggatcagcacccgcagccagggacagctccggggcggatcanacccgacagcgcccgaggcagggcttcaagttctgagcatc

SEQ ID NO: 15 - DNA, 595 bp, Homo sapiens
  misc_feature (1)...(595): n = A,T,C or G
tcacagtctatgtacatttatttggtggtaagcatcttacaaatacgggctttctgtcaggcagtgctcagccaatgtcccaaactggctagtagggaattagtacacaatgtacactgaaatggttttttaaaaaaatcaaaaacaagttgccgctgaaaagaaaatactgaatattgagcaaattgccattcagttccttagtggattacaggtgttaacatcttccttaagctgtacatattttcataatgaatacacagtatgacatttacagcagaagcattaaacaatttgggtgaaaccccattaaaacagtcaaacttgaggaaacgacttctgtatttccaaaaagccatttaaagaaaggtttgaagtagctcttcctgaatactgcccacaaaatagctgagggtgagaattttagggggtgtctcaactccagtaaagtagcatcctccccacctccaaacaccancttaagaatggacatgtacatataattgggcnaaggaagtttcaggggagatcccntgcacccaaaagcagcnaaatcccntacatttctgccaggcttgaatctcctaagttgcac

SEQ ID NO: 16 - DNA, 610 bp, Homo sapiens
  misc_feature (1)...(610): n = A,T,C or G
agtttcctgaggataatggcttccagctccatccacatcgctgcaatggacatgatctcattcctttctatggctgcatagtatcccatggtgtatatgtaccacattttctttattcagtctatcactgataagcatttgggttgattccaggtttttttttttttcattttttaaaaccatttatttggaaggttgtctctagtatgaatactctttccattttgatgttcgggtaaaaaccttagcatgcacattacatttctgtggttcctctcaaagatgtatattctgatgcctagtgagttccaatgcctggggaaagcctctgacacatacatttatatgatttcctttcagtataaactctcttatgacaagtagtgattgaactctagtaaaggttttgccaccctcatttcatttcatacatctatgcccttttaattacctaggatttacaagttctgggcttttgagtagaatttcttggccacacgtattacacttctgtgatttttctccgggatgtatacatccgggaattatatatacaanttcttacacccagtgagtagtggaatantaggctaaaacctaggggnaatta

SEQ ID NO: 17 - DNA, 492 bp, Homo sapiens
gcggccgcggggcccttgcagctgcagctgccctcggcgctcacgctgctgccgccctccttcacctcgctgtgtctgcccgcgcagaactggtgcgccaagtgcaatgcctccttccgcatgacctccgacctggtgtaccatatgaggtcgcaccacaaaaaggagtatgcgatggagcccttggtgaagcggcggcgagaggagaaactcaagtgccccatctgcaatgagtccttcagggagcgccaccacctctccaggcacatgacctcgcataattgactcggaaaggaccccagctttccacgcgcgcgcaagcacagttaagccacctgcaggaataaacacgcgagaacatccaccgcttccttgcaccccgaaaccctgcacaaagacacatacattcaccgcccccccgcgcccccaacgcgcacacacacgtcctctcctcccaggaacctcattcaaatatttacccgggacacacac

SEQ ID NO: 18 - DNA, 229 bp, Homo sapiens
  misc_feature (1)...(229): n = A,T,C or G
tgctccaggaaattggagttcnagctgaaggccttgcngcactccgngcactcgtagggcttctngcccgtntgcgtgcgtcggtgctgcaccagcgtggtgcttcgnccgaagacttgccgcagtccgggcagcggaagggcttcaggccgctgtgtgtctcctggtggtggatgagctgcgagtncgcgcggaaggccttnccgcactncctgcaagcgtagggctt

SEQ ID NO: 19 - DNA, 356 bp, Homo sapiens
  misc_feature (1)...(356): n = A,T,C or G
tatagggagtcgaccccgcgtccgactagttctagatcgcgagcggccgccctttttttttttttttcctttgntggttttttattnccttaagtacaaaatgctaaacgggagccgagctcttccgcattcaggtgttttttttttttttttttcggcttttttttttttttctnacaaactggttgcatttgtngattnattttnccatccttttcaccagtaaagattatcatcgtttatttttgtttttaaagnngaaaacaaaaaagaggagagaacacgagttatggtatgaatgtatgtaaaactatagaganctacnggaatatggnctggggttnttgctgtcttca

SEQ ID NO: 20 - DNA, 82 bp, Homo sapiens
  misc_feature (1)...(82): n = A,T,C or G
ctaccactgcgccgagtgcggaaagcgcttcacgcagaagcatcacctgctggagcaccancgcgcgcacacgggcgagcgg

SEQ ID NO: 21 - DNA, 236 bp, Homo sapiens
  misc_feature (1)...(236): n = A,T,C or G
ttcatatgtttttttagctcattttgttgtctgaatcctctcttgcacctttnacatttcaatggctgatctttagtatganctgaaaggatatggccactaagaataaatggntcggatgttttaaagtcacagtgcctgcactgatgaatctncctacccttatggntatcactatgctttttgagctcagaaggacgatgaaaacctttatcacagacctcacatttgtgagg

SEQ ID NO: 22 - DNA, 320 bp, Homo sapiens
  misc_feature (1)...(320): n = A,T,C or G
gaagacgctgatgtgttttnagctgtccactttgaacaaaggcttttccacagtctggatagtcacacagatagggcctctcacctaagtagacagatgttagatattatatctnagataataaggccagaagaggagggggatggggagagaatcagcctttatataggncatgactcccaataacaataaaacatgtcatggcccctactgagctgcaggtggaaatgctaatggcngcacttnggtggcatcaatgactatctnctgggggnacacaatctattctttaggncttnagggttatcaacttggagcnt

SEQ ID NO: 23 - DNA, 477 bp, Homo sapiens
ttttctttcctcttgctctttcaaaaaccacctcttggaattcattctccgttcctggtcatttcatccacagcttgactgttgtcaatcatggttccttgcctttggagtggtactgtgaaatgacaggcatttgaacagaggagttgctttcaaaaccgtgttctccaagatcatattgaacaagggtctcttcttgttcctggtttaagtagtccggtactaggaaatcacttcatgctttaggcgatgcatctttagcgagtaagccctggtgaactttttcccacagcggtcacactgaaatggtttaattcctgagtggatgagcatgtgctgctttaggttctgaatacgggtgaatcgcaccccgcaggttggacactgaaaaggtctgtcgggaacatttggacttggtcgctctgtactgctggtggaaggagcaatgtagagttggtagggatactgaacattttc

SEQ ID NO: 24 - DNA, 491 bp, Homo sapiens
gcggccgcgcttttagccacagctccaacctcacccagcaccagctcctgcacacgggcgagcggcccttccgctgcgtggactgtggcaaggccttcgccaagggcgccgtgctgctcagccaccggcgcattcacacgggcgagaagccttcgtgtgtacgcagtgtggccgcgccttccgtgagcgcccggccctcttccaccaccagaggatccataccggcgagaagaccgtccggcgatccagggccagcctgcacccccaggccaggtctgttgccggggaatcatcagaaggtgcgccacgaatggaaaccgagcccactcccgcctcgggcccaagccgccgtctcgcagccagcggaggtctgaggtcacaggttgcagccctggccttctgtgaatcccttccacagctaaagggcatatgtcctctgcagatccacagcagagaaaaagtcccgtgcttgctagtcagggacaagggag

SEQ ID NO: 25 - DNA, 156 bp, Homo sapiens
  misc_feature (1)...(156): n = A,T,C or G
aagtcttgnatatgtggcaacggctttggcgacagttccgcccgcatcaagcaccagcggacacaccggggggagtagcccccccgaccagtggtgncccgacggcagccatctcgggcagccacggnagntacccagggaccgaaggcccaggac

SEQ ID NO: 26 - DNA, 380 bp, Homo sapiens
cccacacaggggagaagccgttccagtgtgagtttgagggctgcgaccggcgcttcgccaacagcagcgacaggaagaagcacatgcacgtccacacctccgataagccctatctctgcaagatgtgcgacaagtcctacacgcaccccagctcgctgcggaagcacatgaagtcccctctggtcccccctcccggcttttgtcttgcaggtccatgagtcctccccgcagggctctgaatcctccccggccgccagctccggctatgagtcgtccacgcccccggggctggtgtcccccagcgccgagccccagagcagctccaacctgtccccagcggcggcggcagcggcggcggcggctgcggcggcggcggccgc

SEQ ID NO: 27 - DNA, 525 bp, Homo sapiens
  misc_feature (1)...(525): n = A,T,C or G
cttgtnntanctgtancgagtgtggncgggccttcagtcgctgctcagncctgatccnacatttgaggatccacncnanggagatgcaatatcngtgtgtngtctgtnngggggncntagaacagatnttctcccncattgaagcatcagaggaatccacacgggcgagaagnctcataggtagagtggctgtatngangngcttgcacaacgatngttcagtgcctgatggtanaactcggggtnccttatcaannagtctgcatttgacggatccnngtntgancacagtgnngtacagancatttttngnggaagatttccagantngncctttcnctacttancccnctatnnccccacntcaanagggtnngccccannnggagtnanntttggncnnnttnttnttnnatttnccnnattgggtntcttnnntngggnccaatgnnttaattttaaanggcnttttatnntttttttcaagnaacctcnnnttttncccttnnnaatnntttttntatt

SEQ ID NO: 28 - DNA, 486 bp, Homo sapiens
  misc_feature (1)...(486): n = A,T,C or G
tggncantgcctgtaatcagtgtggcaaagccttcagggacagctcctgtctgaccaagcaccagagtaattcacactaaggagaccccatatcagtgtccagaatgtgggaagtccttcaagcagaactctcacctggcagtacatcagagactccatagcagggagggtcccagccggtgtcctcagtgtggaaaaatgttccaaaagagctcatcccttgttcgacatcaaagagcacacctgggagagcaacccatggaaacataatggttgggggccacatgagtcttccagttcactctcactcctgtgtttaggaggcgtgtcttagatctgactcctctctggtcagtagaaaagaatcctttaagctatccagtgaattggatgaatgtgagacattgctgagccacactgttangtctgctcattggngaactccagagacaacttaggcatgagggcagaaaagtctttgnggtc

SEQ ID NO: 29 - DNA, 212 bp, Homo sapiens
  misc_feature (1)...(212): n = A,T,C or G
ctgtanncgatgcagtnantgcggtaaagccttcagcnngcnttcaaacctcagtangcacagnaggatncacatcanggagangcnctacgantgnagcgantgtggaaatgnnttcggngccntctngtcccggaggngccacatgagngttcacatnggcaggacgcntngggggtgtngncagtgngggaaggcntncgggngncggt

SEQ ID NO: 30 - DNA, 367 bp, Homo sapiens
  misc_feature (1)...(367): n = A,T,C or G
ccccccccccgcctancnatgcnncttgtggatnancatcgcnngnncatcnncnctnnnnaanctccngananctcntacnntnganacgtcatatgactgtgtngantgnnggaaaaaccttcagcaatagctcanccctncttagacattccagntttcatacagtggngaaaccctnccagtgtatcatatgtngcaaannnnntggaaacanatcngnncttgttanacaccagagcanttcattcaggggagaaancttnnagntgtgttcattntngtaanggcntcatcaanntgtcccatctgcanagacatcagatncctnanncaggngananngccnntgggatntnntagntnt

SEQ ID NO: 31 - DNA, 480 bp, Homo sapiens
  misc_feature (1)...(480): n = A,T,C or G
aagnttccnagtgtcccgagtgtgacaagattcctgcntcaggggaagtntgaagnnccacntgtttnagcacagtggganagaggccnttctcttgtnnnangtgtggcaaangtttcacncagcagtnccgnctcacagaccanatncgnctccacagtggggagangcccttcccttgtccatgagtgtgncangagctacangatcagtggggaggttcaaggtccactatgtatgngcanagtnagagagaggccctncnagactttccgncagtgnaaaaagctgccaccaggngngatgncagaaggtccnnctgnnntctgcanagntcaggagnggnctagnttnttgnnatcacngtgnaaggnnntncacanangtttcggccctcaattcccacatttcggggnantcccantntggaaggccnctcctnncttttnntcatngnanntcagnaggtcacnaaagntt

SEQ ID NO: 32 - DNA, 228 bp, Homo sapiens
  misc_feature (1)...(228): n = A,T,C or G
ggttttcattgtgccatntgaggcgcaatttcgtccagatannccatctgagggtccacntgcgactccacactggaggagaagacctanaactgtgagtatctgtngcgncngattcgnacagctgcaccatctncgggtccacttgatcntccacacnggtgagaagncctatcnntgtgagatgtggcgganccatntccggcacnttcancatctgaggattca

SEQ ID NO: 33 - DNA, 227 bp, Homo sapiens
  misc_feature (1)...(227): n = A,T,C or G
cttcagtaaaanttgcacacctcatcattgacgggccgactccaaaaaagtggaaaagtcntacaattgtcttgaatgtggggagcgcttcaggcaganttcacaccttatttgtcatcaaggtnttcagangggngatatacatttggattgtggggggtggggggaaanctctttatttttttttttntggttnagacatcagagagtacatatngggggannta

SEQ ID NO: 34 - DNA, 210 bp, Homo sapiens
  misc_feature (1)...(210): n = A,T,C or G
ccgttccagatcctaggtgtgtcgccttcgctttaccaatcagtcatcactcgtcncactccagcagaacacatacagcggagacnccttttgcgtgnaaggagtgtgggcganggtttactaataantcatccttcatcaancacaagaggttacattcaggggagangccttttgngtgcaaggagtgtngncnangntatactanta

SEQ ID NO: 35 - DNA, 430 bp, Homo sapiens
gggacccgccccgcgtccggtttccagactgtggccgtgattctaaaggaaaatgtgtgctctttagtgggtagaacaaatggaaatttggtttcagaatggctgacagaaatcgacataagtcatgtaatttttgttgatatatcatgaaaatgaacagaattctttttccatacttatatctaagaaaaggcatcataggtttctgaaagagataactatataacagctttttaactatccagtcaactttcagcttttctacatttaggtaaaatggttaggatataactcatggtgtggctaatctacatttatcaataaaatgtaaattatctgaaaggacagaatataagatttaaccatgtttgacgtattttaatttagttaatgaagcaaaattcagtttatatttcactagaactgtgta

SEQ ID NO: 36 - DNA, 148 bp, Homo sapiens
  misc_feature (1)...(148): n = A,T,C or G
gtggaccaagggcttcagtaaccacccgagggtgcacctgacgaagaggttctacgagtgtggtcactgtgggaaaggcttcaggcagctggggttcttcatgaggnatcagaggattcacagccacggggaggtgtagtggtgcccg

SEQ ID NO: 37 - DNA, 303 bp, Homo sapiens
  misc_feature (1)...(303): n = A,T,C or G
gcgaccgcggcancatggcgggcgcgggggcaaagnccgcggggcccggangcggcgcccccggcccncaagcngtacgtgtgtctggagtgcngataggncttcgggcacngggcngggctcctngcgcanctgcggcccagcacagggannggntcggggcggcggggggcgaggagccggaccacatctgcgtggagtgcggggangncttcgtgcagggcgccgcgctccggagacacaanaagatccacgcggtgggcgcgccctcggtctgcagcagctgcggaacagagctacnac

SEQ ID NO: 38 - DNA, 159 bp, Homo sapiens
ataattaccacatttgaattcacactgaagagaaattttattggtacaaagaatgttaggaggccttcagttatccccattcacttcgaagacatgaaagaactcatactctatgtgtcccctataaattttaggaatgttagggagccaatggaatct

SEQ ID NO: 39 - DNA, 247 bp, Homo sapiens
  misc_feature (1)...(247): n = A,T,C or G
gagctgtgcaactacgcgtgcgcgcagagcagcaagctcacgcgccacatgaagacgcacgggcagatcggcaaggaggtgtaccgctgcgacatctnccagatgcccttcagcgtctacagcaccctggagaaacacatgaaaaantggcacggcgagcacttgctgactaacgacgtcaaaatcgagcaggccgagaggagctaagcgcgcgggccccggcgccccgcacctgtacagtggaacc

SEQ ID NO: 40 - DNA, 597 bp, Homo sapiens
gggaaggccttcaggcagagggcttccctcatccgccactggaaaattcacactggagaaaggccttaggatgggagataattccgtttccttgttcaacataataactgacatcagagagaagctccaagcatagcctttatgtgtagccgacagccagaagtagaactttatacactcaaacactcaccctggggaggttcttccgagtgccagctatatgggaagccttctggagctatgctgaattttctagactcttgctggaatttcgtcaaggcagtgcctgttagaagccatctgtctttgtgctggaagagtcctgccttgtggccaaagtaaccccaatgtgtttcaaaagacagacctctgtactattcccttccctgggagggaatcatcagtagcctgaggccatcaaggattctcactttttttctgccccactactggtttaagcatgagcatgacccagttttagcctgaaaaatgggagctttgttctgctgaccactggcagaggtttcccttcatggatatagttgatctcacatggcacttgggacgaatttttctagccttcaagacacctgacct

SEQ ID NO: 41 - DNA, 268 bp, Homo sapiens
cagagaccaagcctcgttattcatttaagaatccacacaggggagaagccatacaagtgtactcattgttctaaaagcttcagacagagagccggccttattatgcaccaggtcactcactttagaggacttatttaagaattgctaagggaaacaggtcttacacaaattgacactaactcaaaaaaaatcttaacctgcagcaggctgtttgtctttggaagcttttgtttgagcttataagaacatagacagctttttttttaac

SEQ ID NO: 42 - DNA, 807 bp, Homo sapiens
tttttttgagtaattccagaatcatgattaaaggtacatttgttattttcactatgttttttgctttcatgaagcgtctgatgcttaatcaagtctgatccactattaaagattttcctacattctccacattcaggttctttttccttattatgaattatttcatgttgaataggacatgactggtacctaaaagcattcttacatttcctgcattcacaggatttctctccagtatgaagccactgatattctctatgggctgtgcactgcatggaagtaaatggtattacagctggtctgaaatgtccctcctgatgaccctgttgtctctccacctggcatctgatttctctgataactctggccttctcctgttgtggtgatctaatttcataaatgttttcctttggagataaattcttggtttctcttccaaactcccaatctggacaccattcttttgtctccttcctcttaaccatccagggctctttcttctgctccaataaggagatcacatttggcttagtatcagaaagccctccgccatcacttcagacgcacagcagttctctcctcttctgggttatgcacagccacacagaatcccgtgcagacaggactcccaccacagccccgcaggcacagcgggcacagatcgccaagcacctgtcgctgggcccacaatccaggtccggggagaactgcccggacttttagtccagacaagaggacgcagggccgcgataccctagacctcctaacattcccagaccgctccagcgccagcctcacaccacaccc

SEQ ID NO: 43 - DNA, 1002 bp, Homo sapiens
  misc_feature (1)...(1002): n = A,T,C or G
gggaaaattttccggacatcccatcaccttaaggtgcacctgaggatacacacaggtcacaggcctttccagtgccgctactgtccctacagtgcctctcagaaggggaacctgaagacccatgtcctctgcgtccatcgcatgccttttgacaacagccagtatcccgaccgcaggttcaagcgctccagggtcgactcagaggcttctgggaatttcgaggagcctacagctgtcaaggcggggagctctgcagacctcacggaagagggcggcaagggccaggaggagaccaactgagcagaccaacctgtatattgcaatagtattttacacagttttaacattatgcatctggtaaaagtttgctaactgcattccaaggggaaaaaatcatgtacaaccccccaatagtgtatagaacatttaaaaaattttaaaagatatctatatatatattaaaaaaaaaaaattccccagcccttgaaaatggctgctaaactgttacccggcaacaagtacttccaaaacaatgcaggtgggagaaaagtgatttcaaaaattcttggtgccctctgagctggagagagctgggggcccttccaactcgaaagtcgtctttgtccaaaaataatgctcttaactgaaaaacgataccatctaaacgatttagtgttgcgttgaagatgggaggggctgtgttttcgttgttgaaaacacctctattaatctggacaccagctgctgttaattcgcctaggaaccctaatgaggtgtgtcggggagggcagctgcgggtgccagttcagactggagcggtcactgcagagaaaattcaattcacgtggtgttgtaactgcactcttgggaggaaaccttaggacggcccgcagccagcgccggggctggaccgncacttgcagagggttgagatctttaaatgcgcattttttacaaaatacacagccaaatgaaatccaatgntcagggagtgtcttgcag

SEQ ID NO: 44 - DNA, 847 bp, Homo sapiens
  misc_feature (1)...(847): n = A,T,C or G
aattttagaaataagtttatatgtgtgatctgttttcaggtggtacagggagggaaggaagggcaaggcagtagctctcagctctgcactgtcctagtcaggtcctttgcggagggggcagcagggcccacgctgtcgtggagtttgcgcacatgtttctttaagtcaaagtttctgcaaaaccctttgccgcaagtggcgcacgtgaaaggcttcttgtcgttgtgggtgtgcatatggaaggttaggttgtagacctggtggaaggccttgttgcagatggtacatttgtactgcttctcgccgctgtgggtcagcttgtggttcttgtagttccctttttggtgaaagcctttgccgcaaaattcgcagacgaagggcttgtagcccgcgtggatgcggatatgcgtgttgagcgtggagctgcggttgaacgctttgccgcactggttgcatttatgtggcttttcctgggtgtggataattttgtgcctgcaagagcgtgctggccctggcgaaagcctttgccgcagactttgcacacgaacggtctggctccggtgtggaccggcatgtggcgggtgagattatagtgagcgttaaacaccttgccgcacacttcgcaggtgaagtttttgggcttgccatctgcggagcctcctggcagcttgctgtggcccttngancctccgcgctcggcagtcagggccgagttttccttcagtacctgctccagcgcgccggaagcgctccttatggggatagggagccgggtgggggaacttgtccgcanccaggccgncagcttggcgttctccagcagaaagagcttggggtgagcagccag

SEQ ID NO: 45 - DNA, 468 bp, Homo sapiens
tttttgaagtggtcaatataaaatttttatttgcacttagtgactcctgaaaatgtattcaaaatttactctcttggtctcttaccacggcaggttagaagctgctaagacaaatacgagatcttctgagcgtgccagcccatccatctgcaccagtaactctgtcttcatccgcaggcttccttcatgttctcccccagaagctgtgcctctctgactcatcaccgactccagctcgtccaggaagatcgtggatggggcgtggtagcgggcaagctcaaataacacccgaacgagtttttctgaatcccctctccatttgctgacaatggtggatgcagaaatgttaaagaaggttgttttacattcagtggccacagctttggccagtaaagtctttcctgtacctggagggccgtacagcagtagtcctttccagggagaaagaattcctgtaaatagctgtgg

SEQ ID NO: 46 - DNA, 335 bp, Homo sapiens
  misc_feature (1)...(335): n = A,T,C or G
ggttgggccaactggttcaggaaagacgtatttggcccaaagtttggcgcgcattttgaacgtcccattcgctattgcggatgccacaactttgacggaagccggttatgtcggtgaagacgttgaaaatattattttgaagttgctccaggcggctaactttgatattgaggctgctcaacgtggtatcatttacgtggatgaaattgacaagattgccaaaaagtcagaaaacgtgtcgattacgcgtgatgtgtcaggtgaaggggtgcaacaggctttgctaaagatgcttgaaggcacgattnccagtgtgccacctcaaggtggcgtaa

SEQ ID NO: 47 - DNA, 346 bp, Homo sapiens
  misc_feature (1)...(346): n = A,T,C or G
ggcacttaaaccaactagaagggatgttcgttcacgatgcaacaaccactcgcatatcgcatgcgtccaacaaaaattgaagaaattgttggccaacaacatctcgttggcgaaggcaaaatcatctggcgcatggtcgcggcgaaacgtctcagttccatgattttatatggcccaccaggcattggcaaaacatccatcgcttcggcaatcgctggctcttccaagtttgctttttcgcatgcncaatnctgcaaccngatnggtcaaaaaaggatttncaaaatttgttggcttnngggaaggaaaaaattgntctttggtggccgntggttttttgctcctt

SEQ ID NO: 48 - DNA, 735 bp, Homo sapiens
  misc_feature (1)...(735): n = A,T,C or G
ctcttcaacctgcttgtccacgaccagagagaaagcctggtgtagcctggacacacagtgtatgcaccagaaaaaggagtttcctcaggaactggccatggaggcctcgatcttctttgaaatgtcactcaaaaggaagctcaattttgacacattgttttcaatgaagccaatcatctccagcttttggagggttaatagctgctgaggagggtatatgacctggcacttgaccagttcttccaaacagaaaaccgtaaattttgaagatggctgctgcagagcgcagactgatatactgcttgatatcagacctgtccacaaaggccatgtcaatcttcacggtgatgttggaagtagctggaatcactacattaaaatgccttttaatctgattaatttgggtcaagacagcgttgacncagtccaatggcacccgatggctttcattatgggtggctgtgagactttctatctcatcaatcagtgaaaatgccagagcatctttataatcaatcaaatcctgaatcttctggaacgtcttagttatcagcttgtcaatttcggaaaaccgtttagaaaagaggttagggctatttatttcaattaattggccataccaatacctgcttgaaagtttaatagtcaatttgtgggctaatgctttacataggaatgtttttccagttcctggaggaccctgtagcagcaccacctggttccaggtgctgaggc

SEQ ID NO: 49 - DNA, 569 bp, Homo sapiens
  misc_feature (1)...(569): n = A,T,C or G
gcggccgcccggggaggccacacagaggcagtcaccatgctgctgcagagaggtgtggacgtgaacacccgggacacggatggcttcagcccgctgctgctggccgtgcggggcaggcatccgggtgtcattgggttgctgcgggaagccggggcctccctgtccacccaggagctggaggaagcagggacggagctgtgcaggctggcatacagggccgacctcgaaggcctgcaggtgtggtggcaggcaggggctgacctggggcagccgggctatgacgggcacagcgccctgcacgtcgcagaggcagccgggaacctggcagtggtggcctttctacagagcctggagggtgcggttggtgcccaggccccatgcccagaagtgctgcctggtgtctaacctgaaggcgtcctgctgcagtataagccattccttcctcccatgacctgctggaggggtctcaggcatgaccccactgctggggctgcttcccagcctgctctcatgtaaancctgaaggcctttgttgggcaggacggcaataaagtctctgacatcccctc

SEQ ID NO: 50 - DNA, 454 bp, Homo sapiens
ttttttttaggtaaaaagatgtatttcaaagtgggatcagtgaatcttcaactaaataaataaatgtacagccccccaagatgcagaatttcccatccctagtttaacagtcacggttcactttgttttacgtgcgtttcgcagatgagtggtgctctcatcagcagacacaagacttctttggcctctgcttttttttcctttcttctaataaggagactacactctgtctgtcaaaaactctggccatttctaggacacctttgccgaactcattttttacacttgcatctgcccctttgtcaagaagtaactgaactaactcttcatgattatttaacacagccaccataaggggcgtctttccatttctgtccttcacattcacattggccccagcatcaattagaagagaggccaccctctgatttcccgacaccgcagagactctcat

SEQ ID NO: 51 - DNA, 443 bp, Homo sapiens
tttttaggtaaaaaggggtatttcaaagtgggatcagtgaatcttcaactaaataaataaatgtacagccccccaagatgcagaatttcccatccctagtttaacagtcacggttcactttgttttacgtgcgtttcgcagatgagtggtgctctcatcagcagacacaagacttctttggcctctgcttttttttcctttcttctaataaggagactacactcataaggggcgtctttccatttctgtccttcacattcacattggccccagcatcaattagaagagaggccaccctctgatttcccgacaccgcagagactctcatgagtggggtccatcctgaaccagtgtccacgacgtctacctcacagccatcctttatcatccactcaatcacactgcagtggcctccatctgcagcccagtgcagagctgtacag

SEQ ID NO: 52 - DNA, 407 bp, Homo sapiens
tgatgttggagcggcaaggacagtctaatgctggcgtgctatgcgggacacctagatgttgtgaaatatctccgaagacatggcgcttcttggcaggctagagacctgggaggctgtacagctctgcactgggctgcagatggaggccactgcagtgtgattgagtggatgataaaggatggctgtgaggtagacgtcgtggacactggttcaggatggaccccactcatgagagtctctgcggtgtcgggaaatcagagggtggcctctcttctaattgatgctggggcaatgtgaatgtgaaggcaaaatggaagacgcccttatggtggctgtgttaaataatcatgaagagttagttcagttacttcttggacaaggggcagatgcaagtgtaaaaaatgagt

SEQ ID NO: 53 - DNA, 445 bp, Homo sapiens
aggtaaaaagatgtatttcaaagtgggatcagtgaatcttcaactaaataaataaatgtacagccccccaagatgcagaatttcccatccctagtttaacagtcacggttcactttgttttacgtgcgtttcgagatgagtggtgctctcatcagcagacacaagacttctttggcctctgcttttttttcctttcttctaataaggagactacactctagataaacaaaacagacaggcgaatgtaatccagggttttggtggtttttctgagtctagaaggactaaaaattagccttgataggcagaaagagcatcccaacctgtctgtcaaaaactctggccatttctaggacacctttgccgaactgaaacaggaaacaacaaaaattttacatgcttataaatgttttctccccctccgaggaaaatctttacataaaga

SEQ ID NO: 54 - DNA, 118 bp, Homo sapiens
caatgtggacggactcactgccctgcaccaggcttgcattgatgacaatgttgatatggtgaagtttctggtagaaaatggagcaaatattaatcaacctgataatgaaggctggatc

SEQ ID NO: 55 - DNA, 438 bp, Homo sapiens
  misc_feature (1)...(438): n = A,T,C or G
acgaacacgccactnngtnctgcaaagatgagancggctggcncgagatccaccaggcctgcaggnacggncncgtgcagcacctggagcacctgctnttctacgggncagacatgagtncccagaatgcctcngggaacacggcctggcacatctgcgccgtctacaaccaggacagctgtgcaagagtgcttctntttcgaggcnganatagggagttaaaaaactacaacagccagactccatttnaggtggccataatagcangcaactttgagctggcagaatacatcaagaaccacaaggaaacagacattggtgagtaggcacgtgganaaactgtgttgggatttggtttggagatnctctgaggantcagttcactnaccagcttttttaaaattctccttagnttgggtttaggagcctgcttttagc

SEQ ID NO: 56 - DNA, 431 bp, Homo sapiens
  misc_feature (1)...(431): n = A,T,C or G
aggaagggaaccacgaatggatttgtaggatcctgaaggacaactttgctagtgctgacgtggcggacgaagagggctacactgtgcttgctgcggctgctactcactgccacaacgacattgtcaaccttctcctggactgtggggccgacgtgaacaagtgctcagatgagggtctcacggcactcagcatgtgtttcctcctccactaccccgcccagtccttcaagcccaatgttgctgaacggaccatacctgagccccagggancctccaaaattcccagttgttccaatcctttcatcatcattttatgggacacaaacctggggagtctctgttactattgagggtggaacgtgcctttnccaggggtaggctantgaggttgagggncaccgncagcaccattggttgctnccacgggtttt

SEQ ID NO: 57 - DNA, 457 bp, Homo sapiens
cttatcatctcctttattaactggacacatccaatcacctggagactgaagaatagctaccacttcactatggcccctttctcgagctttatctaatggagttttcccatcttcatctctcagatctggatttgcaccatgccgtaacagagtctttgctacttgaggtcttccaaaacatgcagcataatgtaatgatgatgacctttgacctctattaacatctgcacctctctcacaaagaaattctaccatttcctgagttccaaaagcagaggcccagtttaatagagtctgacctacatcatccataaaatttacttcaaaggctcctgtgtcaattgcatcttataagtgcattcggtatctttacttcgaatacaatctataagctgccgatgtgagcgctccccagaactatctaatctccggagtcctgggattctgcctgtagatc

SEQ ID NO: 58 - DNA, 352 bp, Homo sapiens
  misc_feature (1)...(352): n = A,T,C or G
tgtggctgcatttggagatgccccttgctgcaacagctgttgtactatgtctgctttccccagtcgggctgaaatgtggagtggtgtttngtcatccttagctttagcttctacctgagctccgtcttgtaccagataccgcacaacttcagcttggccggagcgagctgccatgtgcagtgctgtttctcctctcacantggtggtgtttggtgaggctccatgatgcattagttgtgatacaatatttacataccccattgaaggcagcaacatgggattgggggtaaaggcccccgacctcggtttacagcttgngatgggatgcaccgngtttcagaaggggttccat

SEQ ID NO: 59 - DNA, 337 bp, Homo sapiens
  misc_feature (1)...(337): n = A,T,C or G
cggangnaggngctaatgtaaatgcaatcacgatagatggcgtgactccgttattcaacgcatgctcccaaggcagtccaagctgtgcagagctgcttctggagtatggtgccaaagcccagcctggagtcatgtcttccatccccaacgtatgaggccgccagtaaaggtcaccatggatgtnttnacatcctnatatcctggggcatagatgttgaccaagaaattcctcatttggggactccctctctatgtagcttntatgtnacagcaatttccatngcatcttggnaggcttntnttaatgcttggntncttgacgttccagaaagggcaa

SEQ ID NO: 60 - DNA, 519 bp, Homo sapiens
  misc_feature (1)...(519): n = A,T,C or G
gcggccgctgcactatgcggcctggcagggccggaaggagcccatgaagctggtgctgaaggcgggctcggccgtgaacatcccgtctgatgagggccacatccccctgcacctggcggcccagcatggtcactatgatgtgtctgagatgctgctacagcaccagtctaacccgtgcatggtggacaactcggggaagacgcccctggacctggcctgcgagttcggccgcgttggggtggtccagctgctcctcagcagcaatatgtgtgcggcgctgctggagccccggccgggagacgccaccgaccccaacggcaccagccctttgcacctcgcagctaaaaacggccacatcgacatcatcaggtaggagccggtagcagggagggcctcagccttaggggtccccaggggtttcagcagcagcctggggtttcaggggcaccagttttttggttttggggataaggggcgggacaagggcagggttcccaggttccttggttcanggttttg

SEQ ID NO: 61 - DNA, 237 bp, Homo sapiens
tgtggaggacatgttgaattggcagctcctactttattgaaagggggagcaaatcttgaagaagacaatgatgaaggatacactcccttgatggaagctgcccgggaaggacatgaagaaatggtggcactactcttagcacaaggagcaaatataaattcccagacagaagaaactcaagaaactgctcttactttggcttgctgggaggattttctgaaggtgcagctttcttat

SEQ ID NO: 62 - DNA, 522 bp, Homo sapiens
  misc_feature (1)...(522): n = A,T,C or G
cttcggcacagggttcctgggacacccttgcgcttggctgcttcttatggccacttgagctgtttgcaagtcctcttagcccatggtgctgatgttgacagcttggatgtcaaggcacagacgccacttttcactgctgtcagtcatggccatctggactgtgtacgtgtgcttttggaagctggtgcctctcctggtggtagcatctacaacaactgttctcccgtgctcacagctgcccgtgatggtgctgttgctatcctgcaggagctcctagaccatggtgcaagaaggccaacgtcaaaagctaaactaccaagtctgggcaatcaaacaataagcttcaatgttcctggccccctctaatttgggccgaagtctacgggcacctggactgtttccgcctgcttttgctccaacggggcaagaaccctgactacaaattgcactgaacaagggcctaattgggtccgttgtnccaagaacccgnaacctccttgaaaatctggcctccaataataa

SEQ ID NO: 63 - DNA, 281 bp, Homo sapiens
tggaatgctttttgccattctgaatggtaaatgatgagacaggctaccatggatttcagcaccccttctgtgtttgatcagcaaagaggtgactcatctgaggaagttgacctgaccatggtttatcaagcagcctctaatggagatgtcaatgctctgactgcagtgattcgggaagacccttctatcctagaatgctgtgacagtgaaggatgcacgcccttgatgcatgcggtttctggacgtcaagcggacacagtgaagctgctgttgaagatggg

SEQ ID NO: 64 - DNA, 235 bp, Homo sapiens
  misc_feature (1)...(235): n = A,T,C or G
gaagaaactcaagaaactgccttgactctggcttgctgtggaggctttctggaagtggcagactttctaattaaggcaggagcgattatagaactagggtgttctacccctttaatggaagctgctcaagagggtcatttggagttagttaaatacttattagctgcaggagctaacgttcatgcaacaacagcaacaggggatacagcactaacatatgcctgtgnaaatggnc

SEQ ID NO: 65 - DNA, 526 bp, Homo sapiens
  misc_feature (1)...(526): n = A,T,C or G
cgaggcgggcgcggantgcatggcagtcagcgccccggctgcnagggttcccggcctggggagaccgaggagaacgtgcggcgggtcttccagcgcgcccgggaactggccagccgcggacccagcctcctcttcctggacgagatggacgccttgtgtccccagcgggcagatcgagcacccgagagccgcgtagtgnccaggtgttgacgctgctggacggcgccagtggggaccgcgagngntggttgtgggagccactaaccggccggacgctctagacccagcgctgcgtagacccgggagatttgaccgagagtggtcattgggactcccacacttaaacaaagaaaggaaattctgcaagtgattacctcgaagatgcccatctccagtcatgttgatttgggcttcttgcagaaatgacagttggctatgttggtgccgactgacngcactctgtaggangctgcatgatgccctcttatagtgngaagaacaganaatctgtattatgaatagcttc

SEQ ID NO: 66 - DNA, 465 bp, Homo sapiens
gcgagaggaacaggatgcacggcctcaacgacgctctggacaacttaagaaaagtggtcccctgttattctaaaacccagaaactgtccaaaatagagactttacgactggccaaaaactacatctgggcactttctgaaattctgagaatcggcaagagaccagatctgctcacattcgtccaaaacttatgcaaaggtctttcccagccaactacaaacttggtgggcaggctgcttgcagttcaacgccagggagtttcctgatgggtcagggtggggaggctgcacaccacacaaggtcaccctactcttaccttctacccaccctaccacagccctgagcttcaccacttcccccaggggcatggggacttttgataatttccaagtccatggaaaccctacaatttatttgcagtgcgttatggaatccttgtcttgaaagtacttcccctgagtgttg

SEQ ID NO: 67 - DNA, 286 bp, Homo sapiens
  misc_feature (1)...(286): n = A,T,C or G
ggggtgaattagccgacattcaacgcacagtagcggttgaagatggggcgcaaaaaaatattaccttagcgacactcttttcatcaaagtatcgttatctggtgacggccggtatcggtgtggctgctttccagcaattcatgggtgccaatgcgatcttctactacatccctttgatcgttgaaaaggcaacagggcaatcagcggccagtgcgttactttggncaattnttcaaggtgtcatcttggtcttgggtgcgatcttgtatatggtgatcgcccgaca

SEQ ID NO: 68 - DNA, 348 bp, Homo sapiens
attcccttgggagttttgcaagcaattgcaatgtattttcttcctccaagccctcggtttctggtgatgaaagggcaagagggagctgctagcaaggttcttggaaggttaagagcactctcagatacaactgaggaactcactgtgatcaaatcatccttgaaagatgaatatcagtatagtttttgggatctgtttcgttcaaaagacaacatgcgggacccgaataatgataggacttaacacttagtatttttttgtacaaatcacttgggccaaccaaacatattgttctatggcatcaactgtttttgaagtcatttggatttcaagcaatgaggcagtagc

SEQ ID NO: 69 - DNA, 733 bp, Homo sapiens
  misc_feature (1)...(733): n = A,T,C or G
ttttttttcgggctggaacatttattttacacggagccgggggagtgggggccagggggcaggggcagcagccttcccgggcaggcctcccccggctgcggcagctgcacctactggatcagcttgaaggactcccccgtcatcatggccacaaactcctcatagtcgatggtcctgtccccatccttgtcggcctccttcatcatctgctccgcctccacctcgttgaggggctcccctgcgttcattagcacgtacttgagtgtgttccagtcaatgtagcccttgccctctttgtcaaagacacggaatgccgccctcagctcgctctcctggttctgggccttctcatggtaaactcccattaagtgccaggaaaccatcgcagttgaagaaaccctttggtcatgtcgggtggttgtctgaaaggattctgaagggtggttaaacangggctgctgtgggcagagtgctggggcagtggtggcagctgagtttaacncttggcctggctgcctggggtccccggggtccagattccaagagccttttatgggtgggaaatctgccggccctattttgggacaggctctcggccttatccacaggccccttcccggccngctttggcctgggcttcccctgaccctgaagatgggcaccgaaggctaagtgcgggagccaggaaagggctgagacatggcgggaccctcacacacgctgttccccgtgc

SEQ ID NO: 70 - DNA, 338 bp, Homo sapiens
  misc_feature (1)...(338): n = A,T,C or G
ggagaagccaagagaggcaggaagaggtggcaaaggagtgctggagaagataaggaggctgagctccgacagggagcagggaggaggggccatcttgagactggtgccctgcgagctccaccccacccctccatgcagttccccatgggccccgnctgcatcttcttgaggaaaggcattnctgagaaacagcgggaaagaccactgggacaagatgagattgaagagctgcgggaagcatttnttgagttcgataaggaccgagatgggttcatctcttgtnaaggttctggggaatctcatngagggacgatgggttacatgcccacggaggatgg

SEQ ID NO: 71 - DNA, 1154 bp, Homo sapiens
  misc_feature (1)...(1154): n = A,T,C or G
acatgcctacactaaacaatccaaactgcaagcttgcttcccatcaaattggacagaatttgggagcacactggggaagatataggcccccgacgtttcatgtacaatcgtggtatgatgaagtgaaagactttagctacccatatgaacatgaatgcaacccatattgtccattcaggtgatctggccctgtatgtacacattatacacaggtcgtgtgggcaactagtaacagaatcggtttgtgccattaaattgtgtcataacatgaacatctgggggcagatatggcccaaagctgtctacctggtgtgcaattactccccaaaggaaacttgtagtgccatgccccttacaaacatgggcggccctgttctgcttgcccacctagttttagagggggctgtagagaaaatctgtgctacaaagaagggtcagacaggtattatccccctcgagaagagaaacaaataaatagaacgacagcagtcacaagtccatgacacccatgtccggacaagatcagatgatagtagcagaaatgaagtcataagcgcacagcaaatgtcccaaattgtttcttgtgaagtaagattaagagatcagtgcaaaggaacaacctgcaataggtacgaatgtcctgctggctgtttggatagtaaagctaaagttattggcagtgtacattatgaaatgcaatccagcatctgtagagctgcaattcattatggtataatagacaatgatggtggctgggtagatatcactagacaaggaagaaagcattatttcatcaagtccaatagaaatggtattcaaacaattgggcaaatatcagtctgctaattccttcacagtctctaaagtaacagttcaggctgtgacttgtgaaaccactgtggaacagctctgtccatttcataagcctgcttcacattgccccagagtatactgccccccgtaactgtatgcaagcaaatccacattatgcccgtgtaattgggactcgagtttattctgatctgtccagtatctgcagagcgccagtacatgctgggagtgggttcgaaatcacggtggttatgttgatgtaatgcctgtgggccaaaagnaagacctacatgcttcttttcagaatggatcttcncagaagt

SEQ ID NO: 72 - DNA, 742 bp, Homo sapiens
ttttaagcaataaactattcctttattttaacatttgagaatttcttttgtatataaatgacattaaaagattctcagaagaagaaaacctaagctgaatggattaaaggctgtctgctgaggtgctctccccgttggcttcagaaatggattttggttaggtataataagttgtggagtcctgcagaggttctttacacatttctcttcttttgagcagagagagcaagattctcctcttacgtaaggaggcatatttgcaaaatttcctgcaggtccgtagttgcatacaaatattgcagttgaagctcccccaaggttaggacacattgcaactgcacaaccgacataaaatgaattggcccaaactaactgtgtataatggccacagactctggagcatgatagactatcaaaatcataaaattgggtttcattataccaagccgtaatggcatgtcttggtgtgaatgactttattccacctaaccagatattttctccaacatattcaaaagctgatagcatttatatgatttatccaaacagtcattatgttcaaatttgcactggtttgcccatgctttagccatctttgctaaacctttatcccaaatcatgtatttcatgtcggccgcgggagggttgactttgccacgccattcgttgtgggcttctatgcagttgtctataaagtgtgggtcagtgatggatgggattttggaagatgtagtggctacca

SEQ ID NO: 73 - DNA, 224 bp, Homo sapiens
agctgcacttgcaggagcgcacgatcatgttggaaagctgctccacattgggcttgtggccacctagtaaacgatgggcagcggatccagagcctggggacgcaaaaaggcgccgaaagcccgggggttaatactggttttaaaaggccaggaccttgctgtaatgcgtttccaagctcaaatttaggggagaggccaggcaaaaattggaaggtaaccctggg

SEQ ID NO: 74 - DNA, 687 bp, Homo sapiens
  misc_feature (1)...(687): n = A,T,C or G
agcggccgcagcacatgctgccgcagccatccgagccggcgctgctcttgttgcacaggcggcccacggtgcccgccgagtccaggcgcggctcgcgctcgcagaagtcgggagacttttcgaagtagaccaggtcggcggggctggcccgtcggcgcggcccgggagcgcccggagccggcgagggtgcccccgctgggcccggctccagctggccgccgttgcggttgtgcggccggatgagcgtggcgcggtggaagcggctgcgcagcagcgcccccacggtgcggaactcgggcgtcacctgccagcacgtcttgagctggcagctgcctgacgtgccgtggcacttgcacttccgccgcatgttctccatcactgcctgcctcccaactcggttgttgtgaagcctcattctcgcgtggatgtctctgtgaggctcccgggagtccagaaagtccttagaaaagcgctccccgaagcccatgtccgggctgcagccgccccactcccaggagtcctgcatgcctgagctggctgtgggcaggctgggtgttctgggaccccatggctcangcccttaccacgctgcagtgcatccagttgtaagcggtgcagcttnctactgaaggccctctcgtcccctcgccgggacgcatcacagncacaggccctcagtttgcccag

SEQ ID NO: 75 - DNA, 823 bp, Homo sapiens
agcggccgcggccacaacatcctgcgccagacgcgcagcgagcgctgccactgccgcttccactggtgctgtttcgtggtctgcgaagagtgccgcatcaccgagtgggtcagcgtctgcaagtgagcggcccggggtcccctgggccctgatcgaggtcccctcctggagcctggccctctgaggcttacggtcttggcaaggcagcatcgccttggctcttgggaagaggagattggaccacatgatcttataggaacccctcagctctgaggtctgtgatcgccggacagtccaggcctgtctgaaccccaccactcacttctgtgggctctaggactgactgggttcttcctccctccccgaagcccagacagttcagttgggctgggggttgctccacaccctaaaacaagcctcagccaggcaacccgtcagtctgtctccatcctttcaccccttccctggagatgggaggtggggaatgaatggaagctgacgggcagagagaggaggattaaaaaaaagaaatagacataactgagctgaagtaattccataaagggcccagacagcctcctccaccattcccttcatcattcatttaacaaatatttattttgcactctctttgcggcactctgggggcggtggggtgcctgggggtggcaatgcaaggcactgaggccacagatgtgagtaagcgagacacaacacttttcctcttggaggttacattcttgctggggggaggcatgggcaataaacaagtaaatatacaaaaaaaaaaaaaaaaaaaaaaaaaaaaaaaaaaaaaaaaaaa

SEQ ID NO: 76 - DNA, 493 bp, Homo sapiens
agccgcccctcagcccttgaatctggtatcaagtgtcactctctccaagtccgcatcggaggcttctccacagagcttacctcatactccaacgaccccaaccgcccccctgactccccgtcacccaaggcccctctgtcatcacaaccaccagcatgcacaccggtgggacccatccgcagcggtactcagacaaatacaacgtgcccatttcgtcagcagatattgcgcagaaccaagaattttataagaactgcagaagttagaccaccatttacatatgcatctttaattaggcaggccattctcgaatctccagaaaagcagctaacactaaatgagatctataactggttcacacgaatgtttgcttacttccgacgcaacgcgccacgtggaagaatgcagtgcgtcataatcttagtcttcacaagtgttttggttcgagtagaaaatgttaaaggagcagtatggactgtggatgaagtagaat

SEQ ID NO: 77 - DNA, 289 bp, Homo sapiens
tccacctagctttgatttgattatgaagacaggggctcttttgcttcagggtttcatccaggatcgagcagggcgattgggttgggatttacccgagctggtcctggaccctttgcctcatgatgcgtctatcaagaatctgatcagttgtctcaagcgcatcggggacgaactggacagtaacatggagctgcagaggatgattgccgccgtggacacatactcctcccgagatgtctttttccgagtggcagctgacaaggtttccgaacggaactttaaattgggg

SEQ ID NO: 78 - DNA, 492 bp, Homo sapiens
cttctgattttaatggaaattaaaacatttctgtggactcctaaaagtatgtgggcattgtgctactatgcctaaccaatgagtcagtgctgcctaccaggctgccccacctttgacacagagctgcgtgaagcggactcgcgtattgtggtcccgcagcatgaagtgaaaatcttcccatgtcagttcctccttgtcctggaatcccgactcccggaacatggactccaccacctcagccagctgggccttggacaggcagttgttggagatctcgatgaaggatctcagcatcctgatgaactcatccttggaaatgaggccattcccatcaaagtcgtacatgcggaacataaggcgagacttttcctcaggagagcctttcatgaagaccaccaggatgtccaggaactctcggaaggacaggtagccattgccatccttgtcagccagagagaacatggactcacaaacatgtcctggggcttgagg

SEQ ID NO: 79 - DNA, 346 bp, Homo sapiens
  misc_feature (1)...(346): n = A,T,C or G
ggggaccttagtttgacagggacagggatggacgaattacggtggcggctgccgggaggcggtaccggctctgctcggggagccgctgggggtcctgagctggacgagatgctccgagaagtggacctcaatggggatggcaccgtagactttgacggtgagtctccttcccngaaaaccctcccgtgcttccagggcctaggctgagcccagcacctcctgggatccctgacgtggactnacccaagccctgnccttctctnccgcagagtttgtgatgatgctctnccgccactgaggctccaggnagggaatatctgttncccctgcggcccnagacaccagc

SEQ ID NO: 80 - DNA, 181 bp, Homo sapiens
gagaatttcggaaccaaaattgagaagtaattccattcagtggcaattgtggttacttccaaacagtcaatttcctaattgagcttggaatcaaggcttccattttgggtggttcagttcaagggtttctaaaaaagaaggcaaatgggttgatgtaataaggtgattggaaaaaattgag

SEQ ID NO: 81 - DNA, 196 bp, Homo sapiens
ctgccagatagtcagttcccagtacatcttgcactaatgctggggcaagaagctgcactgcacgcgacacagtgaatactgtgaacaacacctgctggtccggggtcagtgcacctaagttatcaccagaggcagcaatgggagcatctgcgacaacccaaagaactggcaagcggggctgtggtgtgctttacag

SEQ ID NO: 82 - DNA, 317 bp, Homo sapiens
tgatacctttgtgttagaatagtggtacatgaaggtgtgaccattgcttctggacaaactagtggtccaaacactggccgagcccggacagttggctcagagctacgcagaccgacaagagtgcttttgtcgacgagccctgtcattaaacttgcagttagtgaagatctccaaacagtgctctgacacgcaatcatcggtgaggtcccctagtgcccagttagaatagagcagggactctcctgtagagtaggtgaacttgacctctgtctgggaatcagtcgatgtaaggaaagcgggctcggtcttgactacga

SEQ ID NO: 83 - DNA, 82 bp, Homo sapiens
caacaagtggcgcacgggtgagcccaacaatgcctacgacgaggaggactgcgtggagatggtggcctcgggaaaatggaaa

SEQ ID NO: 84 - DNA, 323 bp, Homo sapiens
  misc_feature (1)...(323): n = A,T,C or G
tgtgaagctgcttgttcccacccaattccctccagagatggtgggtgctgcccatcgtgcacaggctgttttcacagtggtgtcgtccgagctgaaggggatgtgttttcacctcccaatgagaactgcaccgtctgtgtctgtctggctggaaacgtgtcctgcatctctcctgagtgtccttctggcccctgtcagacccccccacagacggattgctgtacttgtgttccagtgagatgctatttccacggccggtggtacgcagacggggctgtnttcagtgggggtggtgacgagtgtaccacctgtgtttnccagaa

SEQ ID NO: 85 - DNA, 151 bp, Homo sapiens
cagagtagtcgatctccagaatcttctcgatgaacacacactggttgctggtggcatcgggcatcaccacgaggctgcgtttgcggttcatgaacacgtaggactccgactcctggcacttgatgcgggcttgcctagcgaagagatctgc

SEQ ID NO: 86 - DNA, 269 bp, Homo sapiens
  misc_feature (1)...(269): n = A,T,C or G
cctctctcagccaaggtttttcatgggcctnctttgcacgagaccgtgagctgggtccctggggccactgtcctctggatgggacccttttntcgtggtgccgttcaggctgtattttgctggttgccttgacaggctcatgcctgctcagtgtgtttgcagatggttcaaggtaacacagtaaagtaaggagcggcgtggctggccgtgttcctgctggagagaggaaggnaagccatgccgggcagcaggctncagggccgcacgtt

SEQ ID NO: 87 - DNA, 489 bp, Homo sapiens
gaagagaaccgcgagaagggaagatgggggccgtcctgaggagcctcctggcctgcagcttctgtgtgctcctgagagcggcccctttgttgctttatgcaaacagacgggacttgcgattggttgatgctacaaatggcaaagagaatgctacgattgtagttggaggcttggaggatgcagctgcggtggactttgtgtttagtcatggcttgatatactggagtgatgtcagcgaagaagccattaaacgaacagaatttaacaaaactgagagtgtgcagaatgttgttgtttctggattattgtccccccgatgggcttggcatgtgattggcttggaagaaaaatttgtactggacagattctgaaactaatccggattgaagtttctaatttagatggatctttacgaaaagttttattttggcaagagttggatcaacccagagctattgccttagatccttcaagtgggttcatgtactg

SEQ ID NO: 88 - DNA, 606 bp, Homo sapiens
  misc_feature (1)...(606): n = A,T,C or G
ggcacgagcgccccaagtggctggaatcccacctgctactatcactgtgaattataagagcatctgtgttgtcatttgcatttgcagtgttcccaaacattttcagtctctaacttgaacctaccaactctcttccaatttgctcattgacattcccagcccaaatgcgtttttatatttgcctatgcacactaatcatcacggctaaactttccattgtggacattgcttgatagtttgaaaaacagatttgcacatgttattcatttaatccacacaggaaccttaggtacatgagtattgctaatgcccaattttacagatgagggtagtaaggcaaagtggttgaatgacttcccccaaggctacacctgatgagaggcagaactgagaactgaatgtacacctttcttgactccaaagcttgcttttagatcatgctgttctttacctgaggggttgctctattgtntcaccagcagcaagacacatgctttaagtaagtttttgcaaaaancatgatctgtttgagccaaggtcatcctttatcctcacatncaggattnccttggtntccaggacacacaagctgtnaagagtggttgg

SEQ ID NO: 89 - DNA, 371 bp, Homo sapiens
tgcttttctttattttacaaactttttgctgcaagaaagaatcatgtttattgccagaagaagtaaaaaaaggtgtcatttatattttagaaagaaaaatgtagctgctgagaagcaaagcttagagcagattataaatactggaggcctcactcttaccattgtcacaatgcactcctcgccagccaacatcacagtcacaggagccatctcccaagggtccttgggttgcatctcccatgggacacaagaacatgctaagtggggaaaatcacctgcaaatcgtcagattctaacccatgttcaataactcatttgtcatttactagggtttgctttattggcacttaaattctccaacctacttctag

SEQ ID NO: 90 - DNA, 247 bp, Homo sapiens
cgtggacatcccagatctcagagagcagcggtgggaagtttttgtcctgcagacgcgtggcaaaaacttggtctgagtggacgcttctcagggtccggaggttcaccagtttctttagcacccgggggaacataagtcggtcatggggatggtggatgaaaacttgggattccagggtttccaaaaattggtgtggaggcccctctcctgggggcagggtcctcagtttggggccgttttttccaaa

SEQ ID NO: 91 - DNA, 247 bp, Homo sapiens; identical to SEQ ID NO: 90

SEQ ID NO: 92 - DNA, 456 bp, Homo sapiens
gtgggggcggctgggctccgcttccgcacgtagacctttagcgcctccagcagcggctcctgcagcatgtccacccggtccggctgctccaggtccttggcggtctcccgagatgaggcagatggcgctgagaggccccgtctccgcatcatccatccccagggggcacagctggtttgggaaagcaaagacaagtccgttgagggggccaaagcaacctttttccacctgggtccggttcaggtccaccccgtccgaaaaggtcatgttgtcctgctcgggcgtttaccgcgtgcagatccgcagtcagggaatgtccaggcaggcagccttgaggaggggtgatctgggtgggcgatggttgagggtggtgaaagcggggcagctgcttggcgaacttcacagtcttaatgatgcacttggttgagagttcactgaacttgtcccagaggtcaa

SEQ ID NO: 93 - DNA, 308 bp, Homo sapiens
cattaaagactaggtctggtgcaaaatagagaaaattgccggtccgaaggtttgatagatttccagcctcaggcaaatgatggttggacaatccaagaaaactggattagggtaatttgggccccaaaaggcaagtttttaaatccctggaagacccttgcccactttaacgacttggatcaccggtttgcccgctaagcggttgaccgtggaaaccagattttcggctgtacctggttttggagcggcaaaagcccgaaattaaatttccggttcaaggttttccaagggccctaaagggggaaggt

SEQ ID NO: 94 - DNA, 654 bp, Homo sapiens
ttttgggtgggaagacagaacagctttttattcagttaggtataaatcatatttacaaggcagaggtggggtgtactggggagccgtatcaggtccagggtcctgatgattctccttcaaggggacagtcctgctgcctcctctcatgctccctgggagactctccctcctcggtctctctggacctggcctgctgtgggcagctcagccatgcagggtagagctgggaatgcagatggggtggttaaagcaggagaaagagtgtggcaaggccagcatggggtggctgctccagggcccctgagcatagcctccttcttgcatcttgggttcaggcttcaagcgctggtgaggctggtggggtctccagggctccaggctgctcactgggctatggccctttaggggtctgtgaccgctcagtcctcttgcagcctttggagccctttcctttcttgccagtctttgagggcccccttgtccttcctgcagccctgggctggtttctgtggggatggtgtcttgtccagatgctgcatcagctgctgcacccagagctcctttgggtctgcacatagctcctgcctgagagcgcttgcggggcaagaacaggatagctgggatgaagcagcctaagctttgttcctgcttccg

SEQ ID NO: 95 - DNA, 151 bp, Homo sapiens
caacaaaataagaaatctccatataggtatcaacatccggagaaatatgctgtcgtagaagttacttgatgagaaaaactacaaaagcaaataaggatacaattcatacccagttaaagatgccgtcttcaaacacaatttccatcacttg

SEQ ID NO: 96 - DNA, 198 bp, Homo sapiens
cagtgttgaaaagccctgctgggaaagattttggggagcgggaaaatggccaaaattgcttccaagctaaggccatctaaagcggtgggaagttccccccttgaaaaaagctcctcttcatgaacttcccgcgtttcctcagggggcgttcaaattttttacggactgaaactttagcaggtcctttcacaggggaac

SEQ ID NO: 97 - DNA, 1879 bp, Homo sapiens
  misc_feature (1)...(1879): n = A,T,C or G
cagaacttggaagacagagaagttttgaatggtgtacagacagaactactaacttcgccaagaactaaggacacattgagtgatatgacaagaacagtggagatttctggggaaggaggcccattgggaatacatgtagtgcccttcttttcatctctgagtggaaggattctaggactcttcatccgaggcattgaagacaacagcaggtccaagcgggagggactatttcacgaaaatgaatgtatttgtaaaaatcaacaatgtggatctcgtagacaaaaccttttgctcaggctcaagatgtcttccgccaggcaatgaaatctccaagtgtgctcctccacgtgcttcctccacaaaaccgtgaacagtatgaaaagtcagtcattggctctcttaacatttttggtaataatgatggcgttttgaaaaccaaagtgccgcctcctgtccatggaaaatcgggactaaagacagcaaatctcacaggaaccgatagtcctgaaacagatgcatcagcttccctgcaacaaaacaagagtccccgagtaccaaggctgggaggaaaaccatcctctccctcactctcgcctctcatgggatttggcagcaataaaaatgcaaagaaaattaagattgacctaaagaaaggccctgaaggacttggtttcactgtggttaccagagactcttccatacatggtcccggtcccatttttgtaaaaaacattttaccaaagggagcagcaataaaagattgccgcctacaatcaggggacagaattttggaggtaaatgggagagatgtcaccggacgaacccagcaagagcttgtgtcaaagctcaggagcaccaagaaaggggagacagcatcgctggtcattgccanccaagaatgacatgttctcccccgagttatggatggtcgtctgcgaatgaatgaccagctgattgcacgttaatggggaatctcttttgggaaagtccaaccacgaagctatggaaacacttaggcggtcaatgtccatggagggaaacatccgagggatgatccagttggtgattctgaggaggccatagagaccaatggaggatcctgcagagtgtggggcattttccaagccatgctttgagaactgtcaaaatgctgtaaccacctctaggcgaaatgataatagtatcctgcatccacttggcacttgcagtccacaagacaaacagaaaggtctattgctgcccaatgacggatgggcccgagagtgaagttccaccttctccaacaccacattctgctctgggattgggcctcgaagattacagccacagcttggggtggattcaagcagtatattttccaagatcaagcacatcaacttcagatctgtgacaccggccaggcagcctgaatcaattaatttgaaagcctcgaagagcatggaccttgtgccagatgaaagcaaggttcactcattggctggacaaaaatcggaatctccaagcaaagattttggtccaactcagggtttnaaaaagtccagctcccttggagagtctgcagactgcagtggccgaggtcaggaagaatgaccttccctttcacaggccccggccgcacatggttcgaggccgaggttgcaatgagagctttagagcagccattgacaaatcctacgatggacctgaagaaatagaagctgacggtntgtcngataagagctctcactctggccaaggagctttgaattntgagtctgcccctcaggggaattcggagctagaggacatggaaaataaagccaggaaagtcaaaaaaacgaaagagaaggagaaaaaaaaaaaaaaagggcggccactcgcgcggaaggnggtcgatcca

SEQ ID NO: 98 - DNA, 199 bp, Homo sapiens
gttaggccctaacaaaatagccccgggccgggagcttggtggacagctacgcctaaaaagcgggatttagcgcctcaaaggctcccaaacggcgtgtgacctccttaggtactttgtggaacatagccggcgagaaccccctcttgttggggtgccttcctccgagaacccctttatgaggagaaaaccctgtttaatt

SEQ ID NO: 99 - DNA, 598 bp, Homo sapiens
  misc_feature (1)...(598): n = A,T,C or G
gctcgaccgttccgccggatacgcgccctcctcctgtggataactcaacacaccacgcagcgtaccgatcggcagatacggcttctgcggcaggaacaaataacgctcggccggcaaacgaatgttgccatggccgtttggcacaaattgcccatggccctcagcaaggttgatttgccgctgccggaacgaccgctgagcatcaggcgctcaccttcggcaaccgtcagttgcncncgttcgagcagatgacgaccatccgccagatccaggctgaggttgttcacctgcaaaccgccgccctggcctggcaactcgatgcccatgttgcggccttcgttttcttccatcgcctcgccgaagctcagcagacgatcacaggtcgcacgccagctggccaacacggtgtacgcgtcgacaaaccaactgaggctgccctgcacactgccataagcctggggcacttgcatcagtacgcccaattcgatcttgccggaaaagtaacgcggcgctgccaccacaaacgggaagatgatcgcgatctgcgagtaaccgctggtaaagaaattcaggggttcttgagctgcatgatgctcca

SEQ ID NO: 100 - DNA, 372 bp, Homo sapiens
gcgtcgaccccgggcgatcaacaggcgttgcttctggcccgaggacaattgcacgcccatgggtccgagcaaggtattgaagccattgctcagtttcaggatgctttccagcaacccggcctgctcgacacagctctgcaaacccgtgccgtccagcgggtcgctgtccatcaggatgttctcgatcaccgtcccggcgatgatctcgtcgtgggccgtgacataggccacgctctggcggtacgagcgcaaaccgaaatgccgcatcgcctggccgttgatcctgaagcgcccggtgtccagggcatagaacccggcgagcactttcaggaaggtgctcttgccgcagcccgaaggggagatatcggcgat

SEQ ID NO: 101 - DNA, 332 bp, Homo sapiens
  misc_feature (1)...(332): n = A,T,C or G
ggtcgtccggtcagcgggtggccttcaagcaggatggngccttgctgaggatcgtagaaacgcagcaacagatcgaagatcgtcgattttcccgcgcccgacgcgcgaccagggccagggtttcaccggcattgatgctcaggctcaagccgtcgatagcaaaacgatccgggcgcgacggataggagaaacgcaaatcctggacttccaggcggccgctgacccgctccggcagcttgacgacgtttgcctcgggcgccttgatctcgttgctcgactgcagcaactcgccgatccgctctgctgcaccggccgctcgttgcaagtcgacg

SEQ ID NO: 102 - DNA, 240 bp, Homo sapiens
acgcattaaaaaatatcaatttgaagattgatgaaggtgagactgttgtgttggttggcccatctggtcaggaaagtcaacgttgattcggacaatcaatggattggaagacattcaagaaggtcagttgctggtcaatgactttgatctacacgatccaaaaacggatatgaaccgtatccgtagaatgttgggatggtgttccagcatttcaatttatataacataaatcaacattag

SEQ ID NO: 103 - DNA, 428 bp, Homo sapiens
tataacaaggcactcacaccgatgacgatgagattaactgtcacacttttaatgaaggttaattccaaagcaatgaccataatcacgccaaattttatcagtgggttcatgatgcgtcacctcgaaaagttagttgctggtcttcaaacactaagtggtagtcaaaccaatccgttactgcgtgtaattgatggctaatcatcaccacggtttggttttgcttggtggtcatgtcagcgatgacagctaacagttgtgcctgtgacgcactgtccaagccagccaagggttcatcaaataacaaaaccggcgtgccagtcatgagcatgagcaatacttgcagttttttttgttgccaccagataattggtaacgatgtgctcacgacatgactcaaattaagctgtaccaagatgtcattgagcaaa

SEQ ID NO: 104 - DNA, 304 bp, Homo sapiens
gccaaagtacaagaaggcggttcaggcttctcagctggggaaaagcagttgattagttttgcccgaacgattgttaaagatccaaaaattttgattttagatgaagcgaccgccaatgttggacacagagaacggaagtatttgattcaacaatcactccggaaaatgcgccagaatcggacaacaattgcgattgcgcaccgcttgttcgaccatcaaggatgctgacttaattctcgtgttagataaaggcgaagtggtcgagcgggggacgcatgatggcttactggcgcaacgccgcttt

SEQ ID NO: 105 - DNA, 254 bp, Homo sapiens
gcaattgcttaatttgttcttccttcttagcattttgctgagaagccaaacgttgcgccaattcagaagattcacgccagaagtcgtagttaccaacgaatggtgtgatcttaccaaagtcaacatccaagatgttggttgacacggcgtttaggaagtgacggtcgtgggataccacaatcactaggttcgggaaatcagccaagaaatcttctaaccagttaattgtctgcacatccagaccgttggttcga

SEQ ID NO: 106 - DNA, 445 bp, Homo sapiens
tgattagtgtagaaaaagttaattatcaaatcgctgatcaacatattttacatgatgttgattggcagattccagctggggctcatattacattgacgggaccatccggtggtgggaaaagtacgttattacggatcattgcggccatgatttctaaaacaagtgggaccttgatttttgatgggcagccgattgatagttatgacccaatcatgtatcggcggcaagtctcatattgtttccaacaaccgacgttatttggtgagacggtagcagataacttagctttcccgtaccaaattcgtaagcaagtcatggatacgcaacgagtggtaacgccgttaaataatgttgggctgtccgaacgaaccctgcatcagccgattatcgagctttccggtggtgaacggcagcgggtcggcttgttccgcaccatcttattctt

SEQ ID NO: 107 - DNA, 243 bp, Homo sapiens
cttcaaccactgaggaaaaaacccttttaggcctttttcaactgctccaaaaaaattaaggttaggacggtttgggggcccaggcgggaatagtacggcgtgaaacccttccaaaggctgaagaagcccccgtaacggaaaacttttaacagcaagtccaacccgttcttgtattccgggttcccatcaatcatccgcatgttctggattcggggcttgggaatgtccaacagcattggggca

SEQ ID NO: 108 - DNA, 76 bp, Homo sapiens
cgagccgtagccgctcgggaagcggcacgctgtcctgccactgctggagtcggtcggggagtctggtaacaacacc

SEQ ID NO: 109 - DNA, 232 bp, Homo sapiens
tctgcatcatgtccttgatatacacatggacccactgaggacatgtgatgatacaaacggaatggcccctttaggggatgaatacaactacgggcttgaagcacaggctgcctgactaataggatgccataatacagctgactcgggatcttgagcgagtgtaggagaagcagcacttttaagacaggttaagtcccactgacgatgataaaagcttggtccctaaggccaa

SEQ ID NO: 110 - DNA, 196 bp, Homo sapiens
gttctctctccatgggcttctgatagctgcgcagtgctttgatgcgcataatcgtctgctgccgcagatgcatggtgcgcatcacctcgatctgcacggacgcattctacttcgtgtttagcaggtggcccacctctcggaacttggccaacgtggtccaacaggcactggtgggtgcacagccaggcaccgcgtt

SEQ ID NO: 111 - DNA, 343 bp, Homo sapiens
  misc_feature (1)...(343): n = A,T,C or G
gcactagggggaggctctgagctcgnttcccacctgtccccaggagccgtggtccgaaagccttccagcaccatgtggatggaaacattttccagatacctcctgtctgccaaccgctctgccatctttctgggcccccaggnttccctgaacctccaggccatgtacctagatgagtaccgagaccgcctctttctgggtggcctggacgccctctactctctgcggctggaccaggcatggccagatccccgggaggttcctgtggccaccgcagccaggacagagggaggagtgtgttcgaaagggaagagatcctttggtgagtnctgtcgggagggat

SEQ ID NO: 112 - DNA, 591 bp, Homo sapiens
  misc_feature (1)...(591): n = A,T,C or G
atctttctctgttgtatttttccgtcttgtacactctttccttatggtgaattgccttgactgccttttattaccaagggtatttgttggatcacagaatctttatttcttaagagatatttgctgcttctacttaagtcacaatcctttgtcaggaggaggggcatttccacattcccttgttgcactgaatggagtgattcgggaaagttacctcaaaggccacgaccagctggttcccgtcaccctcttggccattgcagtcatcctggctttcgtcatgggggccgtcttctcgggcatcaccgtctactgcgtctgtgatcatcggcgcaaagacgtggctgtggtgcagcgcaaggagaaggagctcacccactcgcgccggggctccatgagcagcgtcaccaagctcagcggcctctttggggacactcaatccaaagacccaaagccggaggcattcctcacgccactcatgcacaacggcaagctcgccacttcccgggcaacacggccaagatgctcatttaaagcagaccagcancacctggacctganggccctccccaccccagagtcaaccccaac

SEQ ID NO: 113 - DNA, 235 bp, Homo sapiens
  misc_feature (1)...(235): n = A,T,C or G
tgcccgtgcgcatcttccaggnctnccgcagcctcaagttctcgacatcggatacaatcanctcaagagtctggcgcgcaactctttcgccggcttgtttaagctcaccgagctgcacctcgagcacaacgacttggtcaaggtgaacttcgcccacttcccgcgnctcatctccctgcactcgctctgcctgnggaggaacaaggtggccattntggtcagctcgctggactgg

SEQ ID NO: 114 - DNA, 539 bp, Homo sapiens
  misc_feature (1)...(539): n = A,T,C or G
ttcagttcttggcaacggcgacaaaccacaacattatcaaggaatgtaatgcagactttttaagttgtgcgcaaatgactgtttcccttctggtcatggacatgtccaataaatagattgtagaaccactgtactgtataaacttcatttatacatgcagttcataaaattatttttttcttaactgaataatttaccctgttatgtatatatacaaatagataatttttgtctcaatataatctaatctatacaacataaatccactatcttccccttttaatggtcaatgtacatacacaagaagtgtctatccttatgaatcgccagccaattctacttttgctatccatggttagggcccgcacgtacgactgggtagttcgacactcggagttccaatgccttttgtctatgcccctgcagccatcattagtgtaacctatgggattgcactttgtatccgacaagtattgcttcaggtagcacttatgatacatggacctattcacagactgngacgcgnaccgtcagacatg

SEQ ID NO: 115 - DNA, 177 bp, Homo sapiens
aatctgacctaatctatacaacatagacccactatcttccactattaatggtcgatcgtacatacacaggaagggtctatactattgactcgccagacaactctctttgtgctatccatggattgggacctcacgtacgactcgctagttcctgactgtgagttacaatgactcttg

SEQ ID NO: 116 - DNA, 597 bp, Homo sapiens
  misc_feature (1)...(597): n = A,T,C or G
atgccctcccctctgtgtggccggaatccttgcctgtggctttctcctgggctgctggggaccctcccatttccagcagagttgtcttcaggctttggagccacaggccgtgtcttcttacttgagccctggtgctcccttaaaaggcccatgtctgtgaccttctccgaaccatcccctctctctccctctccccctccaggccgccctccttcccctggcttccagaggcagaggcagaggcagaggcgggctgcaggcggcatcctacacctggagctgctnggtggccgtgggccccgatgtcttccaggctcaccaggaggacacagagcgctatgtgctcaccaacctcaacatcggggcagaactgcttcgggacccgtccctgggggctcagtttcgggtgcacctggtgaagatggtcattctgacagagcctgaggctttgctgtgggtccgcagggtgcntccaaatatcacagccaacctcacctcgtccctgctgagcgtctgtgggtggagccagaccatcaaccctgaggacgacacggatcctggccatgctgacctggtcctctatatcactaggtgncc

SEQ ID NO: 117 - DNA, 592 bp, Homo sapiens
gcggccgctacctgagcaggctcagcagctgccggcggctgcagggggaccaggcgaggccggcgcggggcgcggcgccgtccgaagccatcacgtgtccgctggggccgcagccgctgccgggcgcgccgtcgtgctccaggccgaagctgtgcccaatctcatgggcaatggtgactcccaggtcgaagccagtgtcctcggtaatgaggcagctccaggttggggagcaggcaccgcccagctgggtgacgccccgcacctgccggttaccatcaggcaactccaggtcaaacctagtgatatagaggaccaggtcagcatggccaggatccgtgtcgtcctcagggttgatggtctggctccacccacagacgctcagcagggacgaggtgaggttggctgtgatatttggagcaccctcaggctctgtcagaatgaccatcttcaccaggtgcacccgaaactgagcccccagggacgggtcccgaagcagttctgccccgatgttgaggttggtgagcacatagcgctctgtgtcctcctggtgagcctggaagacatccgtgcccacggccaccagcagctgcat

SEQ ID NO: 118 - DNA, 160 bp, Homo sapiens
tatcagatggagaccagttagaatataccgcaggctttccatttagccatgtgtcataatcatcattttgtagacctatccacacactggtgttcgggccaaaaagattcatagtaatggaagcttgctccgcctcacttgctatggcgagtagggtccc

SEQ ID NO: 119 - DNA, 1036 bp, Homo sapiens
  misc_feature (1)...(1036): n = A,T,C or G
tttaaatggattatatcataagtgtaataggtgacagcctgctgaaacattttaggggcattccttgtacaaaacttacacataaattaaaaaatcaatttagctttctacaacggtggatgccaacccaaacacatttccagggagaatatttcatttatatgtagatcttcttcatcttgcaaattgacttctgaggtacatgacagtgaatgtcattccagccccattcttctgaagaacggaaatttattatcgcacaacgctcatcaaggttattgggttcacctgagtgccagaatctcattctatactcacgtgacattttcattgtatggtgtctggtcaacccattgccaatgtcgccgaccccctggatctgacagccccagaaaataagaagaatttcttttcagattctgaatgatgaaatcctgttcttccctggtgttgatcaccaccagatcagcccccatcacagaacagttcttttgactcttagtccaagattgcatcccagtagaaataaagtagcaactagactgaaatgaagtccaaggggttgggcagcagctccaatcttctatgtacttatcttacaggacgcaggtcggcttgagtgagaccgttgaactccgtaacttggacgacctctggacgttttgcatacataaaattgtgaggcactcggtcctgaggctctcttcaggcaacaatgtgtgggcgcacacacttggacattctctatcaggtgggtgcgaagcgactggtaaaactttctccaaagatggtgacttgcggagttgtggttgtatgctaaacaggccaagcctcgagagcccttcgcgtctaggcctgaggcangtaggggcatcgcacaccaatgtcaggtcagcacgagagtagcaacttggaggagaagttgatacgtgggagcacgtgactgccagcgcggtagttacgagcatatagaatgggtacgctcgaaggttacgacggtttcgtcgcgcaggcgtgtgggtgtctgctagagtcn

SEQ ID NO: 120 - DNA, 121 bp, Homo sapiens
ttactgtcaggtacccagggctcatgtcacttggaattggaagaggtctccagagtgcgccgggtatttagagcctggattccggtcaatttttccagttactttcagagccgtctcatgt

SEQ ID NO: 121 - DNA, 199 bp, Homo sapiens
ttataaaactcgtagaaagagccgggccagcagtggacaatcagcaagggcttcggggtatatactgcgggagatgagagagtcttcacgtggatgaagtggatgtccaggccttcattttagtcttgaagtgagggaattgcggataatcttagcgtgattcttccagtcaaatgcaattacgcaataggagatgact

SEQ ID NO: 122 - DNA, 336 bp, Homo sapiens
  misc_feature (1)...(336): n = A,T,C or G
aaggctagaaactgttggagattcaacagcctggctccagtgtatcatgtcttgcacagcaaattccagtcccgagaatgagagtgtatatacatccactctacacatatggaaatttctctcatagactcccaccgaagaacacagagattcccacagagcttcttctgtatgacatgagtgctaacgtgtgtactcgaccacttcaaatacgcactctggggangatattctctgtctccaaataagtccttaatgagatgatctggtatcgtcctaatttgacctagggttagtacagaaagcgatgaagccacaggaccagcgcataaacat

SEQ ID NO: 123 - DNA, 173 bp, Homo sapiens
  misc_feature (1)...(173): n = A,T,C or G
nccacacaaatgtagaaattacttttattatgtnaaaatatnccttaataaactagcaattatttatgnggaggngcanccagaaaacnggtncangactgaattanccttgnccttgattatagagatncatgaangacacncataaccctatttnctggagtagctgtgaa

SEQ ID NO: 124 - DNA, 412 bp, Homo sapiens
agaaggaattcacctggtgtattaaagtgaataatcataaaccactcacctttgttgttattagcagcagaacaatgatgtggttagttaattaaagctgaaaataagctttttgcctggrtttttatggcggcttacgccgccgttgaaactttaatcatcacccgccacgcgghtcaccactttgccgaagtttttacccttcagcaggccgataaacgtctgtggcgcattctctaaaccgtcagtaatttcttcgcggtagtggatttthtcctctttcacccattgccccatctccctctgawactcatggatgsggtgaccataatcctgagcgataataaahccttgcaagcgaatacggtttttcagcactgtagccatcaacagaggtaaacgatcccgaccc

SEQ ID NO: 125 - DNA, 291 bp, Homo sapiens
gcacgagcaggaaggctctgacagagttaatgaattgggtctcagagggtaaagtccagtgtcatgaatacgtcactgaaggatttgagaaaatgcccgcagcatttatgggaatgttgaaaggagaaaatctggggaagaccatagtgaaagcatgaaaataaaaatggcccacggatcgtcgctggagggttagctttttaccattcagtgcaagtgtatactgtcctatgtaagatgtaacagcaatgcgtttgacctagctaataaaacatgtgtgtttttttttcc

SEQ ID NO: 126 - DNA, 522 bp, Homo sapiens
tgaacactgctaagttggagccagactctgttggtcgcgtctttggactgggagcactcagattagcagtgaacatgggctgtatagtggctggtgcgtctcggatcaatggtgtggatatcaatatagatgaatttgcaagggacagagagtttggagccattgaatgtatgaacccgcaagagtatagtaggcccatctgggaagtgctcaatgagatgaccgatggaggagtgtactattccggtaaatgtattggtaatgtgaacgtcatgagagcagcaattgatgcatgtcacaagggctgtggcgtcacgtcggtcagttatagtagctgcttcatgtggagaaattgccactcgtccattccagctggtaacatgtcgcacatggacaggcactgactttagacgagtgcaagagtctagagtagtgtgccacagttgatgtctgaatatatgtccgaaacgataatagttgatgaatatgtgactcacaatctagtcgatgatgatatcgaca

SEQ ID NO: 127 - DNA, 437 bp, Homo sapiens
tggcgaacgaggttatcaagtgcaaggctgcagttgctggggaggctagaaagcgtctctccatagaggagatagacgtggaaacacagaggctcatgaagttcgaatcaagatcattgacactgaagtttgccacacagatgcctataccctgagatgaacttatcctgagggttagttttccagtgatcttgggacatgaaggtgctggaattgtagaaagtattggtgaagaagttactaagctgaaagcggagtaacactgtcaacccaaatttacataccacagtgtggaaaatgcaaattatgtataaatcctaaaactaagctttgccagaagataagagtcagtcaagggaaaagattaatgccagatagtaccagcgaatttcttgcaaaggaaagacaattatgcattacaatgggaacagcacatt

SEQ ID NO: 128 - DNA, 202 bp, Homo sapiens
cttgcagccccatcattgcatcacctgccttacagcttttgactgccactctcatgtaaggatccaaagcgaggaactaagctggaagcctgaccggttgatttccaaagggtgggagcttacatgactgaaacccaaagtcgctattagcaggatcgtcaacagggggctaattcagggctcatgactgacctcgaaccat

SEQ ID NO: 129 - DNA, 790 bp, Homo sapiens
  misc_feature (1)...(790): n = A,T,C or G
nnnnnnnnnnnnnngntnttcaagtctatggcgattntcagcctggtnatgtcttggggatatccgcantctggtaacgncnntnngganaacgcactggggnnacgtnccncnggaaagcaancnagggtcacgtccnnatggatgctgtgntcaggcccactggcaantgttacctggagcggtncgntcaggncttggngacggaactgccccggtntgngctncccatctncctgggcctcctgtctgagctgcacatancaggaaccnacatgttccagaagaaagagatacggnaggagggttntgacccnagtattgtgaaaganccgctgtgctntctagatgnccagangggccgttacgtcccnctgngccaagaggnctacagccgtatccaggtagcngaggagaagctgtnattccccccatncntcttgaggggcggnggntgctggatcccnnaggcccaggntccggcccagagnnggcctggacaaggncagaccanagnaagnaggggcntgnaactcatcctgaggngtggcccnncccaatcccaaaaantggcaagtgattnatnggcnttccccnacccttcnaggnggttttntttnnaaangttnnanttccaagtnctnttttcttgggnttggaaaggccccttgttcccaggtttanatttaagggnctttttaaanntttnnntttggnnggngggtgggngnnannaaaaggggnaacnngcccnccnnggnagnaaggggtttttttttnncccaggttt

SEQ ID NO: 130 - DNA, 479 bp, Homo sapiens
agtgttaatatagtttattatgtctttaaaaaaataaggccctctctccaagaagcttagtttgcaaggacaaatggcaggtgcacattgaaaaataattgtctctaaatctttttacttgcaaaggttcaggtgtaattaaaaaaaaaaaaaaaactatccttttaatgaataatttcctaaaaataaaatcgcaccttatagtcttcaatcaagttaaagttggattctacgtatgaagtggctctgcgaggtctatcgagtttctttctggaaatgtcatgagctaaaccaccagggaatattcagagcttcagagttttatcaattatgggcattataaatgttctcagtcatgggcacaaatgttttctctgcatcatccatgaaatacaaggtatccttggatgaccgtggggattgaagcccctcttccatcagggtcactttgcggtgtttaaaagtcccgtgatcccaag

SEQ ID NO: 131 - DNA, 304 bp, Homo sapiens
  misc_feature (1)...(304): n = A,T,C or G
gatcctggcctcgcagttcctatcccntgacccagaacagctcaccaaggagctgcagcagcatgtgaagtcagtgcagcccatacaagtcccaaanaagatagagtttgtnttgaacctgccaaagctgtcacagggaaattcaacagaccaaacttcgngncaaggagtggaagatgtccggaaaagcccgtncgagtgagncgtctaggagcattcatttggattccctcttctttctctttcttttccctttgggccttggcttactatnatgatatgagtcctttatgaagacatgatg

SEQ ID NO: 132 - DNA, 421 bp, Homo sapiens
  misc_feature (1)...(421): n = A,T,C or G
tgaggtggtagctacctgggaagccatcagccatggggaggcagccagtgccgagtacttcaactttgctcatgatgtgttggatgtgtggagtcagctggaaaagacagggcaccggcccccaaatcctgcattctggtgggtgaacggctcaggaacagaagtcaagtggacatttgaggagctggggaagcagtcgaggaaggtggcttttatttcagaacctgccaaagacggtttctggaaagatcctaaggagtaaattgagaaaccaagaagttgggggaagattgaattgcaaccccaagagaagattgcttgccgattgcacttgaaaggttcttgaaaggagaaggaagttggggcaaggcaagctncctcccttggagtacttatnccttcaaagaattggntatccaan

SEQ ID NO: 133 - DNA, 501 bp, Homo sapiens
ctcagttgaaaactgcattattgtgagcatgaacaccgctgaccctggcagccagggcatcacacacagtaggtaggaaagaatacctagaggctgcactgggagccctctctagcaagtggtgcttttcattttttttgatcactgttttccaacttgaagacacattggtgacatctactaactcatgaaacatagacccttggcttgagtttcacatttgcgtattttaaaggcttttgacagttttattccattttctgatgtttcctctgttatttcatccacactggtgtcccatgcataaaccagacagtgcttgggaggggcagaagggctgcggcctcctgcagtgtatgattcacaggcctcttgctacaggtcattgatgacaagggcagcatcctgccacctaacacagaaggaaacattggcatcagaatcaaacctgtcaggcctgtgaagctcttcatgtgctatgagggtgaccagagaagacag

SEQ ID NO: 134 - DNA, 518 bp, Homo sapiens
  misc_feature (1)...(518): n = A,T,C or G
gccgacctactactactaaattcacggccgctcgacccgggagcagcttcgttgcgtgtcaggccatcgcaattcggaaacactcggatggtcaaacaccacgccgggatgaacgtccagctgcaattgcttgcgcaacgccgacaccagtttgatcaccagtaacgagtgcccgccgagggagaagaaattctgctcgatgctgagccgctcgacccccaacaactgcgccatgccttccgccaacaaggtctgcaacgcggtacttggcgccacatagacctgcgccgccagcagcgactcgggtgccggcagcatagacggtccagcttgccattggccaaacggggcagatgctccagggcaaagaaatgcgccggtaccatggcgcccggaaggctcgcattgagctgctcacgcacnacgtcgagccaaccttcggcaggcgtcccttgcgcctggacatacgccaccagttgcacattggcctcatcaccttcgcacgcacgccaggcagt

SEQ ID NO: 135 - DNA, 518 bp, Homo sapiens; identical to SEQ ID NO: 134
  misc_feature (1)...(518): n = A,T,C or G

SEQ ID NO: 136 - DNA, 351 bp, Homo sapiens
ggtcgactgatcatgtccttcttgcggtcgacgatacgcacgaagccgtccgggtcgatcaccgcgatatcgccggtcttgaaccagccctcggcatccagcacctgttccgtggcctcgacctgctgccagtagcccttcatgacctgcggccccttgatacacaactcgccacgctcgcccaacggctgctcgaccccgttgtcgtcaatgaccttcaaggccgtaccgggcactggcaaacccaccgtgcccagcttgcccttgtcgccataggggttggtgcaggcgatcggcgacgtctcggtcagcccgtagccttcggttgatgcggcaacccggtgaagtttg

SEQ ID NO: 137 - DNA, 315 bp, Homo sapiens
gctcgacgtcagcgccaccggaggccatgccaccggaggcctcgaactgtggaaacaggcggggctgggccatgtgcgcctgctcaatacctacggcccgacggaaaccaccatcaccgccagttacctggagtgtgacgcttatgttcgcggcgaattgcccaagccgtcgtcgatgccgatcggtcggccgctgggtggcggcgcatgtatatcctcgacagcgatttcaccccggcggtccagggcgccacgggcgagttgctgatcggcggtgcttgctggcccggggttatcacggccgtcgacgcggcg

SEQ ID NO: 138 - DNA, 289 bp, Homo sapiens
tcaggattccctcacactcagcctgatacattattgtcgtctggggccataatgactgtgcccggttgttcagttcatacagagttttaatcacgattcccacattgaagcctttacgcaccaaccgagtcctcatcatcttgaacgatctggtgaccttcatggcgtcctgtatgcggatgatatgctgcgtattgtacgcagggatccatgcccgaacgtgcttgtacaatctttctcttacaaaagtctggcctttggttatatcgacagtattcttgctcatcct

SEQ ID NO: 139 - DNA, 533 bp, Homo sapiens
ttgttgatatcagtattttattacttgcgttatgagtgctcacctgggaaattctaaagatacagaggacttggaggaagcagagcaactgaatttaatttaaaagaaggaaaacattggaatcatggcactcctgatactttcccaaatcaacactctcaatgccccaccctcgtcctcaccatagtggggagactaaagtggccagggatttgccttaggtgtgcagtgcgttctgagttcactgccgattacatctgaccagtctcctttttccgaagttccttccgttcaatcttgccagtgatggtttttggcagctctgagacaaactccaccttccttgggtacttgtatggggctgtaactgaattgaaatgctgatgaagttccttggtcagctgatccttgtcatgggacaggaactgtggggtcaggacaataaaggccttcacaacctcacctcgaaccgaagtagaactgcccaccacccctgaccccacaacctctatgtacccaaccaaatcgctttc

SEQ ID NO: 140 - DNA, 291 bp, Homo sapiens
  misc_feature (1)...(291): n = A,T,C or G
nnnnnnnnnnnnnnnnnnnnnnnnnnnnnnnnnnnnnnnnnnnnnnnnnnnnnnncaaggttttttaaaaaaaaatctcattttattttaggagggccagggccccaaggggaaaaaaaagaaaaaaaaggggggaacccaaaggaatgttttttaaatgtttaactgggcccgggtttttcgggacattttccactctttgtttaaaagctgggctcgtgaaattttccctgggacagtttgggccaggttaaaaacaaactctatcttttttgggtacttgatgggggg

SEQ ID NO: 141 - DNA, 127 bp, Homo sapiens
  misc_feature (1)...(127): n = A,T,C or G
caggcacaacaatgcctacccaaaaggccttntagctgtccccatggacatagatttgcgccccaggtttgcnntccgattgtgatgtctcaaatcttctcgggtgcacatattctccttggagcag

SEQ ID NO: 142 - DNA, 252 bp, Homo sapiens
acgaagctgactcctggccaggccagcccctggttccctacccatacccctgtgagcttgcgcagctcacgccttacctccctccctctggtctgcagatctctcacttcaagattccgaagtacatcgtgtttgtcacaaactaccccctcaccatttcaggaaagatccagaaattcaaacttcgagagcagatggaacgacatctaaatctgtgaataaagcagcaggcctgtcctggctggttggctt

SEQ ID NO: 143 - DNA, 242 bp, Homo sapiens
acccaggccttggctgcatcaggttggcgaggatattacggtgggtgagcatcgccccttggcatcgcctgtggtaccgccggtgtattgcaggaaggcaatgtcatcgtgggccagcttgaccttcctgacccgcagcgttgcgccatgcttcatcatccgtggaaaacggatcgcccccggcagattggaaacgcggcacctgtttctggacatgccgcagcacaaagttcagggccgcg

SEQ ID NO: 144 - DNA, 546 bp, Homo sapiens
  misc_feature (1)...(546): n = A,T,C or G
tttatggatgagttttatttttttatttttggttgtttgcattttctaaactttagaaatataattcctacgtattggaagcagtccagagtcttcttcaaactcccacagccccaggctcaatagcaataaccaaagcattcacaatctctgacccaatgcattggcaacatcatcaactctaccagaccaccagaagtagccgtcttcatccatgatccctctgtcacctgtgaggtaaagcatgtggcctcttgctgaagcatattcctcccagctcaccatgtgtggacagtacagagaagcaggttggtttagttttatgcggattgcaatatttccttcttcccctggaggcaggagatttgagttttcatccacaatctggacaatataaggtggcaatggcttccccagagagcttggcttcaattttattgtttttgaagtggcacagagtagaccagtttccgtctgcccatagccttcaatgatgtccaacttagtgatgcgtntccagtcctcaatcaccccaggggttgatgg

SEQ ID NO: 145 - DNA, 434 bp, Homo sapiens
  misc_feature (1)...(434): n = A,T,C or G
ctcgtgccgaattcagcacgagctcgtgccgaattcggcacgagcgaaccccagaggtgagattgtgatcggtggccagaatatctccatgggatattttaaaaacgaagagaaaacagcagaagattattgtgttgatgaaaatggacaaaggtggttttgnactggcgatattggagaattccatcctgatggatgcttacagattatnggatcgtaagaaagatctggtaaagttacaagcaggaggaatatgtntctcttgggaaagtaggaagntgcactgaagaattgtccactgatcgacnacatcttgtgctttgggcaaaagtgaccagtcctattgtgatcaanntttggggggtccctaaccagaaaaagttnggnttcttttngggacnacaagaagggggttgganggntcttgggtttgg

SEQ ID NO: 146 - DNA, 229 bp, Homo sapiens
gcgggcaggatcccattcactcagacaccagcacgtccaccttcttgggcagtaccacatcctccaccttttgctggaccacggtgatgatgctagcaaatactgtctgaaggaccaggtgccccgtgggctgtgccatttaactggcctccaccgtggacaccgttataggccgcgccatgtgagcacagaggagactgatgatcccagacccacacaccaggtgcag

SEQ ID NO: 147 - DNA, 350 bp, Homo sapiens
ggcttaccaatgctatttcaatacaccttggatttaacaatattgcagatattgagataggtgcatttaatggccttggctcctgaaacaacttcatatcaatcacaattctttagaaattcttaaagaggatactttccatggactggaaaacctggaattcctgcaagcagataacaattttatcacagtgattgaaccaagtgcctttagcaagctcaacagactcaaagtgttaattttaaatgacaatgctattgagagtcttcctccaaacatcttccgatttgttcctttaacccatctagatcttcgtggaaatcaattacaaacattgccttatgttggtt

SEQ ID NO: 148 - DNA, 350 bp, Homo sapiens; identical to SEQ ID NO: 147

SEQ ID NO: 149 - DNA, 460 bp, Homo sapiens
tttcagagttgataatgggcttatacccagctacccaataattgtatgagtttttgtagataaatagttgtttacatgtattcatcttctatttcacttacaacttatgtaaaaactgcatttcgtgccaggcctgaaatgttccaaagctgagttctgtaattacattgcaactaagatttataaacttcaaaaatggtagtggttcaaatgtatgtctttcaatagactgtattttattgcaggataaatctaaatactggagggatagcaggccttcaaatgaatccttgtgtaattcagtcaagttattttctctgagaattagtttctcggtccaactgtacactttccatacatttccatcaatgtaagaaatatagtttccttggaaatttctgggattatgcagttggttctccaggtcaggtgcctcagggaggtgacccttcctgttctg

SEQ ID NO: 150 - DNA, 460 bp, Homo sapiens; identical to SEQ ID NO: 149

SEQ ID NO: 151 - DNA, 379 bp, Homo sapiens
  misc_feature (1)...(379): n = A,T,C or G
gcacttttgtggattacaagaacctcattctgttggatctgggcaacaataacatcgctacttgtagagaacaacactttcaagaaccttttggacctcaggtggctatacatggatagcaattacctggacacgctgtcccgggagaaattcgcggggctgcaaaacctagagtacctgaacgtggagtacaacgctatccagctcatcctcccgggcactttcaatgccatgcccaaactgaggatcctcattctcaacaacaacctgctgaggtccctgcctgtgggacgtgttcgctggggtctcgctctcttaaactcagcctgcacaacaattacttcatgtacctcccggtgggcagggggtgctgggaccn

SEQ ID NO: 152 - DNA, 379 bp, Homo sapiens; identical to SEQ ID NO: 151
  misc_feature (1)...(379): n = A,T,C or G

SEQ ID NO: 153 - DNA, 475 bp, Homo sapiens
cggggtctgtggcaagcaggaattctcctttattttccaatagggttaacaatctttcccaggaagagcacggaaggtattttctcgctgtaaatcagcagcagatagggtttgtctatcttgacgacgagtggtgtctccatgggcagagtctgtgctccggtgccagcggcccttccgtacccctctcatccatcttcagctcagccttgttcacagcctcgcccactttcaggctgcgatgaggggcgatcttggtgagatcaccatgttcctcaaagattttggagacacctatgtaggagagagtcttcttcaggtcgaaggtgcccgtcatgtggagtctgggtacagacacgtctacgaccctgcgtgacagtaatgttttccatctggagaaagtgtccacctgcaatcccttctccaagtgcttcagcttgccctcatcaggaaggatgaagatggctgtgatatt

SEQ ID NO: 154 - DNA, 555 bp, Homo sapiens
aaagaacctgacccttgtctgaaaagcaacaaacaaaaagtgctggctgacagctctctggaggggcagaaaaaaacgacagagcctctggatcagcaggctgggtccttaaacaatgagaccggactggtcagctgcaactttgggaagcttctctccaaattagacaggttcaggactgattacacactgagtattgccaacaggctttatggagagcaggaattcccaatctgtcaggaatacttagatggtgtgattcaattttaccacacgacgattgaaagtgttgatttccaaaaaaaccctgaaaaatccagacaagagattaacttctgggttgaatgtcaatcccaaggtaaaatcaaggaactcttcagcaaggacgctattaatgctgagactgtgctggtactggtgaatgctgtttacttcaaggccatatgggaaacatactttgaccatgaaaacacggtggatgcacctttctgtctaaatgcgaatgaaaacaagagtgtgaagatgatgacgccaaaaggactcttccttttctca

SEQ ID NO: 155 - DNA, 943 bp, Homo sapiens
cgcaccgtcctccaggtttgtgaccaacctcaccaaagagtttgagatttccgacacggacacgcgcatcggggccgtgcagtacacctacgaacagcggctggagtttgggttcgacaagtacagcagcaagcctgacatcctcaacgccatcaagagggtgggctactggagtggtggcaccagcacgggggctgccatcaacttcgccctggagcagctcttcaagaagtccaagcccaacaagaggaagttaatgatcctcatcaccgacgggaggtcctacgacgacgtccggatcccagccatggtgcccatctgaagggagtgatcacctatgcgataggcgttgcctgggctgcccaagaggagctagaagtcattgccactcaccccgccagagaccactccttctttgtggacgagtttgacaacctccatcagtatgtccccaggatcatccagaacatttgtacagagttcaactcacagcctcggaactgaattcagagcaggcagagcaccagcaagtgctgctttactaactgacgtgttggaccaccccaccgcttaatggggcacgcacggtgcatcaagtcttgggcagggcatggagaaacaaatgtcttgttattattctttgccatcatgctttttcatattccaaaacttggagttacaaagatgatcacaaacgtatagaatgagccaaaaggctacatcatgttgagggtgctggagattttacattttgacaattgttttcaaaataaatgttcggaatacagtgcagcccttacgacaggcttacgtagagcttttgtgagatttttaagttgttatttctgattagaactctgtaaccctcagcaagtttcatttttgtcatgacaatgtaggaattgctgaattaaatgtttagaaggatgacatgcaaaaaaaa

SEQ ID NO: 156 - DNA, 479 bp, Homo sapiens
tttgagacaaggtctgctatatcttgaactcctgggctcaagccatcctcccgcctcagcctcccgagtagctgggactgtaggcatgtgctactgcacctggttaattttttttactttattagagacaggatctagtgttatgttgcccaagctggtctcgaactcctggccttaagcaatcttcctgcctcagcctcctgagtagctaggactacaaactcaagccaccatgccctgtgattcaagtctctaaatcacagctgtgtgtatgtgtagtaggaattaaagtactgaagcttaaaatcattaaaattatcaatggtccatcattgagaaactgtgattactttggtaatcaaagtatttctaatatttttccaactgaatataataaagaaatcatccctgacaggattagaatgaacttcccaattagtttcatcttttaccaggctaacaataatatgtaaaaatac

SEQ ID NO: 157 - DNA, 534 bp, Homo sapiens
cacaagacagtcttgttgaattagttgcatgcaggagcaatgctgttcttcccatgagcagtaaagtcatagtgttagagcgcaggatccatagcggggagaggctgtgcggacttgatggcctggaggctggtgcctggttacttggtgacgtgcatagctctctctggggggctgcagcttatcttggggggagctggacttatatgcccccgtaggtgcaaaagcaacatgcacatatgactcctcccggtgctttttgagagattcctgcagcgctgtctgcgccacggcttccataaatacaggcttcttgctgtagacttctacagtgaccggagcagtgttggcatcatagtcaaagagctacacgacctcctcagagacaccggaaggaacgtgcgagtacatatgtgtcggaggccaccgtgagacccgcacatagtactaggtctcgtctctgctgacggtcgtcagctggacacccagtaaacatgtcgatagctgcttcaggaaggaagagcgtgagcatct

SEQ ID NO: 158 - DNA, 272 bp, Homo sapiens
gctctttagggggggctgaaactaatttcggggggagctgaactcaaaaccccccgctggggcaaatagcaacaccacacatgtactcctcccggggcttttgggggaattccgagaggcctttgtccgccccggtctccataaatgaagggtttttcctggggacttacacagggcccgccccagggtggggatcaaggtcaaagatgttaagcaccacttcagggacaccgggagggaacctcccaattaaaaagggggggaagcccccg

SEQ ID NO: 159 - DNA, 505 bp, Homo sapiens
ctcacaaaacagttttattgaattattttcatgcaggaccaattctgttcttcccatgagcaacaaagacaagtgtaaaagtgcagtaaccaaagcggggaaaggctgggcggagttgggggcctgaaggctgggccctggcaacttggtgactcacaaaactctctctggggggctgcacccaattttggggggaactggactcaaaaccccccgttggggcaaaaccaacatccactatttatactcctcccagttctttttgcggtattcctacaactcttcctcccccacaagactccataaattaagggttcttactggaaacttctacagggaccagcccagtgatgggatcaaaatcaaaaagcttcacaaccccctctatgaccccggagggaacgtccgattcaaaagtgtgggaagccaccgtggggacccccaaaaagtactgtctttcccttctgtgaggttgccaccggaacacccaataaaccgtcgttca

SEQ ID NO: 160 - DNA, 443 bp, Homo sapiens
  misc_feature (1)...(443): n = A,T,C or G
gggggctcgcacctacattttggggggacgctggactaaaatccccccgagggggcaaaagaaaaatccaaatttaactcctccgggggttttttggggaattccggcagccctttttccgccagggcttcaataaattaagggtttttcctggaaacttttacggggccccgcccagtgagggaatcagaagtaaaaagtttaaccacccacttattgacaccggagggaacgtccctgtaacaagtgggagaacccaccgggtaaccccanaatgttattggtttttctctttcgtgaggtttggcaggccgaacaccaatatatatctgctcttaatcttctcccacaaagaggaggggagaccttttctcacggaaggactttaaacacttttgtatttcttgtcaacctctcgaaacctggagggattgcgagctccc

SEQ ID NO: 161 - DNA, 606 bp, Homo sapiens
ccagctcacaaaacagttttattgaattagtggcatgcgggaccaattttgtttttcccatgaccagcaaagtcgagtgttaaagggcaggacccaaagcggggaaaggctggccggatttggggccctggaggctgggccctgtttacttggggacggccaaacctttttttggggggctgcacctaattttggggggagctggactaaaatccccccgtgggggcaaaagcaacatccacatttaactcctcccggggctttttggggtattccggcagcgctttctccgccacggcctccataaatttagggtttttcctggaaacttctacagggcccgccacagggatgggatcagagtaaaagagcttcacaacccccttagggaccccggaaggaacgtccgattcaaaagtgtggaaacccaccgggtgacccccaaaatagtactgttcttccccttgcgtgaggtttgccagccgggacacccattaaaactgctcttcaacttgctccagcaaggaagaagtgttagcatctcccactgttaggacttaacacgctggtggatttcctggccaactttcagcgacctgaagggat

SEQ ID NO: 162 - DNA, 968 bp, Homo sapiens
  misc_feature (1)...(968): n = A,T,C or G
gcttcccacacaagaggcctcatttcttatatcccaagtcccgcttggtccgcagcctcatgtctccctcccactatgggcctccgagcttccacaacatgttccagcctttctttgagatgatccaccaggctcaacaggccatggatgtccagctccacagcccagccttccagttcccagacgtggatttcgttaagagaaggtgaagatgaccgcactgtgtnaatggagattcgccgcaactccacatggatgccctgaagatgaaagggccagtgtgaaaaagtgccaaggagatcttgtctgtggactgttcaaccaacaatcctgcccaggctaacctgcgccaggagctngaacgactcgctccaggtggccgagacgtgnaacaagagcagtacaaggagcttgctgcagtccttccagtcgaaagatgctcaacacctcattccctgctggagcaagctgaacgaccagttcaaactgggtttcccagttggctaaccttcacacaggncgaagacaagtacttaccttcgggtctccaccgtgaccacccattcctctgactcagaggtcccntcccgtgtcactgaggtggtggtgaagctgtttgactctgaccccatcacagtggtgttaccagaagaagtctctaaggataaccctaagtttatggacacagtggcggagaaggcgctacaggaataccgcaggaaaagccgtgcggaatgagatagaagcatcaccttcctatatgtaggagtgtctgggagggaatctcccagctccccgaggtggctgcagacccctagagaactccacatgtctccaggcgagtaggcctcacccaagcagcctgcccttcctctggattctgtacactaatgcctgcacttgctgctctcgggaagaactgattcccccacgcaactaatccaataaaagccccttgcgatacgtga

SEQ ID NO: 163 - DNA, 527 bp, Homo sapiens
ggttccatcgactggggtacgtaatcctatcgtagatgaaccatgcgtgctcatcagatcagatcgtgtccccgttgagctgacttgccgagatcgtccggtgtaaatcctgacgccgctgtagattctgcatcagctcaagacatgcattttgcagactgctcgagttccagtacttgcacgacgtagtagcagctgtcttcacgaggcagatccctccatttcagaaaccctgtgcgtgaggtcagggcctcacagtagccaggaataacaccgcttggcgctccaatgcccatgacctataggaaaccactgacccactgctccaatgccagcgaggcatcgtatcggggtactgggcgccaatccagacgtgggagtcatcactgccaatctccttaatccgtgaggaccccaaggcaccctcgttccgcgctaggctcagacaccacgtcgcccgaattcatgattcgggactcaggaatcgcttcagcccaggtctcgcggtattacagtaagtagcagca

SEQ ID NO: 164 - DNA, 291 bp, Homo sapiens
tggtgaggagctggtccagttgagccaccctgtcatattgccttttcaggtccagcttggggacccttgggaaggttctcttctcatacccccagttgacatactcagagaagggctttttcttccaccagtcataggtgaattcttggaagaaattcttctcgttcaaaggtagctcaatttccttcttcaccttgagaatattggcattcatgtggtctcttctttcaaaatgttggtctttccactggagagggttcgtagatggggttgaccgtccccctatttctt

SEQ ID NO: 165 - DNA, 214 bp, Homo sapiens
  misc_feature (1)...(214): n = A,T,C or G
tgttataaaggccctggagggcctgggttttttctttgaaagggagccctttttccacaaaaccataagttggttaatggagaaagcccctcattttggaagggccaaaaccttttttattccccttttggcaaggttcctccacccatccaatattttttcggagggctcccaaanaggcttgggttttcctttggggtccatcggcctttcc

SEQ ID NO: 166 - DNA, 235 bp, Homo sapiens
gggagggggcggtactttccctgcccaagttccgatcccaccaggactggaagactctcgtccagctggagctttgccgcatatgcgttgttgtgccagcgctattcgggcgaggaagtgctttcttagaggagtgcacaaactcgtgactgatcctatggagcgtgcggccatagcgctgtgctgaccaaacgatgtggggcacctgatctcgagcggtctcgaaaggcgctga

SEQ ID NO: 167 - DNA, 133 bp, Homo sapiens
cgtggatgtaaaaacgggctcggacaagacaccatatgaaatgtactcggggctcctgcgagacgcataggtatgcgtaatgcacgggatcgatgacagcgttgccagcatagttatcgcacagctcgtcttc

SEQ ID NO: 168 - DNA, 172 bp, Homo sapiens
caaactcctgggcctccatggggctcatgtagcggtaactctccaatgcggaatcggacaactgcaggctctgtttggtgtcctaggcgtaaatgttatagagctgcttcttgagcttaatgatctcctctgcatgcatggcaatgtccgttgctttgcccgggggccttcc

SEQ ID NO: 169 - DNA, 190 bp, Homo sapiens
tgatagctgggacacgatatattgccggcaacggttctacagagtccctctgcaccagcgtgggcacatcctcatcgtcctggggatggcagaccataaacttgtctaagattccaaattcatgtggctccatggagctcatgtagacggtcccctccatggcggactcgataacctgtaggctcagttt

SEQ ID NO: 170 - DNA, 373 bp, Homo sapiens
acacctcatacccatagaggaggaccatacaggtcgcggcgagcgcgcctatgacatctactcgcggctgctgcaggagcgcatagcgtgcgttatgggcccgaacgatgacagcgcagccagcctatgtatcgcacagctcctttgcctggaatccgagagcgacacgaagaccattcacatgtacatcaacagccctggaggggtggcgaccgtgggcctggccatgtacgacacgatgcaacacattctcaacccgatctgcacctgtggcgtgtaccatgccgtcagtatgtgctcgctgcttctcgacgacagtacgccacgcatgcaccactggctacacaactccagtattatgatgcaccagccc

SEQ ID NO: 171 - DNA, 531 bp, Homo sapiens
tttttaaagaccacaaagatttaatttaaaatcacagtgtctcagctggaatgccccgtccatagcgggcacccctgcaaattaaaagttcctcaagaggcccctccaagcccagcaacaaggggtgagcagggcccagctgggggtctggcaggcctctggcccctccacatgattctggagaggaggcccagctctcaggtgctagctgggacaggttctgctgccggcgctgcttctcaggctccttctgcaccagcgtgggctcatcctcaccgtcctggggagggtggaccaaaaccttgtctaagatgccaaactcctgggcctccatggggctcatgtagcgggccctctccatggcgggctcgatcaccctccagctcttgtttgtgtgcttggcggagagggaaaaaaactaaaaactggttttttagaactaaaatctctttgtcggcggaagggaaaatttttgggtttggccccccgcccccctctggagggtgggggaattaataaacggaaattggg

SEQ ID NO: 172 - DNA, 546 bp, Homo sapiens
gcctggcaatgcagcggtgcctgcacgcgacgggacccgggctctcccgctcattcccatcgtggtggagcagacgggtcgcggcgagccgcctatgacatctactcgcggctgctgcgggaggcattcgtgtgcgtcatgggcccgatcgatgacagcgttgccagccttgttatggaaaagttcctcttcctgaaatccgggagcaccaagaagcccatcccaatttaaatacaaagccctggtggtgtggtgaccgcgggcctggccatttacgaaacgatgcagtacatcctacaaccgtattggacctggtgcgtgggccaagccgccaaaatgggttccctggttttggcggcgggaccccaggaatggccatttggttcccaaatcccgtatcatgattcaccagccctcaggaggcgcccggggccaaagccacagaaatttgccagccaggcagaggggatcatgaagctcaagaagcagctctataaaattctaggccaagacaccaaaaagagcctgaaggtgatcgagtccgca

SEQ ID NO: 173 - DNA, 124 bp, Homo sapiens
gactatgcagaaaatctcgaatacgatctgataggatggcaaatgagattcgagcagtgaccttcatagtctccactcatatcatgtactgatccaggttaacaagcggatatccacagtttcc

SEQ ID NO: 174 - DNA, 117 bp, Homo sapiens
aggaattgttcttttccacacgatgcacaaactctcgaagacgatcagcagggatggcaaaggagattccagctgtgaccttcatggtgctcactccaatcacctcccgatccaggt

SEQ ID NO: 175 - DNA, 196 bp, Homo sapiens
cacgatgaaccagcacgaataaacccaccaataagagaactgcatacttaaatttaggatagtccttcatgggggtggtcccaattccaatataagggaaaaatcccctggcctcccccacaaaaattttttttctcaagcaaatttggtccttgtttaaaggggctcggtcataaaccggcattatatctccttt

SEQ ID NO: 176 - DNA, 289 bp, Homo sapiens
attcccgttttaaaaccccataggccccctttacagccaaaagagcatccttgaatttgggaaagccattcattatttgggggaccatcccacccttggggaaaaccccttttgcttttcccaccacgccctttttttccagccaggtcgggcctcttttggaccagccctattcaacaacctcattattatctcccttagccagaaatttgcgggctcactcttttttttcaggaactttgattcaccctgggacccttgggaagggcccgcccttcacttctaacac

SEQ ID NO: 177 - DNA, 214 bp, Homo sapiens
gaaccgctactaaggaccccaggctagagagaaccgcttactaaattccaggatagtcattcaactggaccgatgcgatcacaatatctggaacgcctgcactagctctacccacaacatctcagatcggtagccagagatgtccttgactatagatgcgccgggcatacaccgcattattatgtgctatgggcaaaacatcgagatgcccatt

SEQ ID NO: 178 - DNA, 382 bp, Homo sapiens
ctaatactttattggttacctctaggcctgtgtgcggctgggtggggttgggggggggggtcactatttatcttctttgtggggggatgaaaaaggcttgctagcccccccaagggcccataattttgagttttgagggggagggttggccttttctgggttagcataagggaaccaagtggggggaaaggtggagaaccaacacaggcacctatgcagggggggaaactcactatccgtttggcagcctaattgtgtttggggaaaaaatccttcctgtcatcaacgttggggtgaatagtgtgactgccaggcttccaccaagcgggagaaaaatcctcatgcttgtttgtgtattggaagggagggaccaaacgcagag

SEQ ID NO: 179 - DNA, 457 bp, Homo sapiens
  misc_feature (1)...(457): n = A,T,C or G
attaatgggcagctttactaatacatcttacaaacaatatgcctgcccacaacgccaactcatgccgttcctaccaaaggaagaaaggctggtctctcgaccccctgtaggaaaggactgccttgttggacaccacaattcgggtgaatctgaagtcttgtgttttactaatggaaaaaaaagatccagagtaggcttagtactcatggctgcccaccgtagactgtcactaaatcagcccagcgctcagttttgcttggagaaatattctttgctctttgggacatcaagcttgatggtatcactggcaggtttccaggcagctgggcacacttacccatgtttgtcagtgaactggaaagactgaactagtcctaagagctnatacacagaacgggcaacagggaggtaatttacagggaactggcgaaaaaaacccttaatgataaaggataaa

SEQ ID NO: 180 - DNA, 262 bp, Homo sapiens
gctggggggggaagggggggttttttttgccaaaggggacccttctgggaaaaacccccttaggaaaaagacttttgggtcttttttaaagggggggggagaggaccataaccctatccccgtccttccaaaacaaggggggggaaaccctttttttggttgaaccatgggaagagaaaagcaccctaggaaatttaccaaagtctcgcgccgggggatcgggggagaggaagacaacttttccttctttataggacccaaa

SEQ ID NO: 181 - DNA, 411 bp, Homo sapiens
agtctgcagtcttgcgttttactactggaaaccaaaaatacaaaagaggttttgctctaatggctgcccaccgtaggctgccactaaaacagcccagcgctcacttctgcttggagaaatactctttgctcttttggacataaagcttgatggtatcactgccagcactccagccaaatgggcacactaccccatgttggtcattgaactgaaaggcctgacctagttgagagactgctccacagagcggtcatcaggcaggttattatccgcgagctgtcgacaaataccctcatcatctatgatgagcaggccgctgaacgagatgccgtcatcagcctttaagacccgataatcctgagcaacggcgcgctgaggctctgataccagaggaatgcacatcggtgccag

SEQ ID NO: 182 - DNA, 516 bp, Homo sapiens
  misc_feature (1)...(516): n = A,T,C or G
taagacacagagtctcgcatgtcaccaggctggaatgcagtgatgcaatcacagctcacagcagcctcaaactcctgggctcatgcaatcatcctaccccagtctcctgagtagctgggactacagatgctttttctaattctttattattttatttatttatttatttattttgagatggagtctcgctctgtcgcccaggctggagtgaagctccgtctcaaaaaaaaaaaacaaaaaaaacccaacccttgcgtaatttgatcttgatagtccagcagcatagctagaaatttagattcttccaaacaagtttataagagcaaaagctagggggtacaatgccatacctttcttggtgtatttatccaggcaagatggctaaaagtggggaatccactgaggactgcggccaactttcaccagttcacatcgtgaaattcgttagctttggcactaaaagcaacaacaattttcttgtaggggcnacaccaaaggntgaaatnccaaaggggt

SEQ ID NO: 183 - DNA, 121 bp, Homo sapiens
aggagaactgcttctcgggaacatagctctgctctttgaagccgataccaccatcggtcgcatctgctcccacgaatttcagggacactcatggggcattcacctgtcgcacgcgcgggac

SEQ ID NO: 184 - DNA, 178 bp, Homo sapiens
aaaaattaatatgaatgatattacaatgggtagatcagtggatgagaaaataagtttggttacagaattaaagtaaaatgaaaaaaaaggagaagtatgaaatgatggatggaaacatggtagtgaaacaataataccagatcaagatggaaagatgaagtatttagataacatgaat

SEQ ID NO: 185 - DNA, 241 bp, Homo sapiens
tccgactccgctgtgagactatcctttcagcagcgctcttccagccaccaagcagcgcttctccatctttgtcgctgtactccaatacttcagccgaagctgattccccatccagtggtctacccacagcaacatcagtcacattaatttgtcttaagattcctttttcatcaataatgaagacacctctaatattctgccctgattcctctagtcacacaccacactcctttgacatcct

SEQ ID NO: 186 - DNA, 463 bp, Homo sapiens
taatacgttattggttagctctaagcctgtgttgggctgggttagcttaggggagggcgtaactattcaacctctaagtggaggcatgagaaggccttggctagggcctccagggtcccatactgtggagtttggaggggaaggtctggccttacctgtgacagaatagggcacccaggtgagggcacaggtagagaaccagcacatgcacctatgcaggggcacgaactaactaaccgcaaggcatcctaattatgtttggagatatattccatactgtcatccacgttgggcttaatcgtgtcactgacaggcttccagcacgcgggacaaacttccccatcctagtctgtttaatggaagggatggaccagacagagagcctcatccacggagcgtctcacaggcaaatcattaataatgatctggcggagacacgctagcatcgaatataaaaaggccc

SEQ ID NO: 187 - DNA, 490 bp, Homo sapiens
ctaatactttattggttacctctaggcctgtgtgcggctgggtgggcttgggggagggcttcactattcaccttctaggtggaggcatgagaagggcttgctaggcccctccaggtcccataatggggggtttggagggggaagtctggcctttccttggtcaacatagggcacccaggggggggacagggggacacccacccaggcacctaggggaggggacaagctcactttccgttagccacccaatttgtgtttggagaaatatcccttgcggcccaccacgttggggttaatcgtggcactggacagctttcagcaagcgggaaaatttctcccatgctcttcttgtgtatggaaggcctggaacagccgcagaaccttattcccgggggggtccccaagggaaaatatttaaagtggtttgggggaaggacccctttccattcgtggataaagaggccccttggggaatgccttcatcttgttt

SEQ ID NO: 188 - DNA, 148 bp, Homo sapiens
acgggggtgcgaaacctttattagctgtcagctcgagacacatgactaccctgagaatctgctccaagttcctggaagtggtagctgggtagaggttagacacgttcacgttgttatcaggatcaaaacgaaacacctgcgaggtcgt

SEQ ID NO: 189 - DNA, 377 bp, Homo sapiens
aagataagtgctgtgtctcctcctacccctctgtagggaattggcctgccttgtaagacaccacaattcggctgaatctgaagtcttgtgttttactaatggaaaaaaaaaaatactgaagaggttttggtctcatggcttgcccaccgcagccttggcacttgaaaaagtgtagtggtcaactctgcttgtagaaatattcgttggtcttttggacatcaagcttgatggtatcacttccaggtttccagccagccggggcatcactccccatgtttggcagtaaactgaattgcctgaactagtcgtaaagtcttctccatatatcggctaaagggagttcagttatgggatctgctaaaaataccttgtcttca

SEQ ID NO: 190 - DNA, 314 bp, Homo sapiens
gtaagacaccataaatattggtttgaaatctggtagtcttgtgggtttacttattggacaaacaaatatcacacaagcagtgttttgttcctatgggtgctccacctagcctggtcttaatacaggccaatcttaattttgattgaaaaaattctctgctcttttggacatcaggctttgaggtatcattgccaggcttgcagcctgctggaccactataccatcgtttgtataaatctgtaaggcctgatccatctcatatatctcaatcacagtagcgccaactgcgaggctcattacattgatctgtcgaa

SEQ ID NO: 191 - DNA, 544 bp, Homo sapiens
ttttttttcacctctccctaatactttattggttacctttaggcctgcgcccggttgggtgggcttgggccagggcctcactattcaccttttacgtgaaggcatgagacggccttggcctagccctccagggccccatactgtgcagtttgtaggggcaggcttggactttcctgggaccctcggggcacccacatgcgggaacaggtggacacccagcacaggcgcctattcaggggcacaagctcactatgggttagccagcctaaatgcgcttggagaaaaagtccttggtggcatccacctcgggcttaatcgagaaactgccaggcttccagcctgcgggacaaacttacccatgctcgcctgggtactggaaggcctggaccagccgcacagcctcattcacggagcgtccaacaggcgaatgattaacacagatctgtcgaacgacaccctagccatccatgattaagaggtccctgtaggccatgccctcaactgctgcaccacgccgtcattctgagacaagctcgggccacgt

SEQ ID NO: 192 - DNA, 365 bp, Homo sapiens
acgttccatcccaacttttgatgcgggttcaccacgccaaaggttaccaccgccgacaacaatggcgatttgtgtgccaagatcgtgtacttctttcaaatcttgcgcaatttcagaaactacggcaaggtcgatgccttggctttgtcgccagctaatgcttcgcccgaaagtttcatcaatacacgtttgtatttaatatcagtcatgatttacctcatttcattatctagtccattataccaaattttcccgcaaagttggtgcgttatatgaaattaccgcctgtttataggcaattaacccaattgcttagcaacttcttcggccaagtcagtcactttcttttcgataccatcaccaac

SEQ ID NO: 193 - DNA, 698 bp, Homo sapiens
  misc_feature (1)...(698): n = A,T,C or G
tnnncgaggacggngtnggcgccccttgctcatcaccttggtgacgtacagcgggnagtgtgnctgcttggcgatggtgacagctcggtacaccgactcagcctccacctcctcggggtggttgagnacgtggncctcggggccagtgntgccgagctccagaaaccgcttctgctcctcctccacgatgtccccgttctcagagtgaacctgggccaaggcccccaggtcccggatgatgctgangatctcgnacatctggttgtcgctgaactggaaccggtcctngtttgccatgaagacagganggagttcacacccttctccttgaccagggnctccagctcctccttgatgttctcatgccatcgggtgatgtccacgtgcagggagtagtcggaggaggtcgtntttntcgnccgntccccgccactttttcgnnggcccaangngaaganggggttggnngnttttggnggaggcccatcaccnnccaggccttgnaaaaccggatgggttccanaantttttngnnnggnaaaggaanttggggtccaaanggncccgaanggcctttccnnntaaaaattcaaaccccccnnnntnaaanncccaggnnccccccnccnnngggggaagggcccccnccccnancctnnntttttngtttnntccccnggangggggggccctccccc

SEQ ID NO: 194 - DNA, 286 bp, Homo sapiens
caatgtccttgcaagcgtgcaacacttggtacagctcactgactcgaagcatgtataggtccttgtaggtcataaacatctctaacgatttgatacccttcttcagcatcagtgtctcaaggactgctttcatctctggtgcccacaatgtgatcttcacgtggatggcgtaatcacatcagagcttcggatcggtcaaacctcagcacttctcataatcttcctacagggaggtctccttgtctgtcaggacgtggccgatgatcatggtagtacctccgactag

SEQ ID NO: 195 - DNA, 127 bp, Homo sapiens
gtacaacatcttcgagggtatgtagtggcacggctccccactagttgtcatcagccagggccagatcgtctttcaagacggaaacatcatcgtcgacaaaggcatgagccgcttcattccgcgaagg

SEQ ID NO: 196 - DNA, 486 bp, Homo sapiens
gcggccgcagcatctcggaggagaacatgcttgccaactcagccagcgtgaggatcctcatcaagggaggcaaggtggtgaacgatgactgcacccacgaggctgacgtctacatcgagaatggcatcatccagcaggtgggccgcgagctcatgatccctggcggggccaaggtgattgatgccacaggaaaactggtgatccctcggtggcatcgacaccagcacccacttccaccagaccttcatgaatgccacgtgcgtggacgacttctaccatgggaccaaggtaatgctcctgtttgccaaaggtggcttcctctttggcttttttattctgcttctagggctgctccagactagactcatgtgagccaggtgctcccagtgtattgctggcaggagaaggggtgtcagggccactgtggcaactacaatagggatttccggcttaacgtcacagatttccatgattatagaaaaggag

SEQ ID NO: 197 - DNA, 570 bp, Homo sapiens
  misc_feature (1)...(570): n = A,T,C or G
gcggccgcagcatctcggaggagaacatgcttgccaactcagccagcgtgaggatcctcatcaagggaggcaaggtggtgaacgatgactgcacccacgaggctgacgtctacatcgagaatggcatcatccagcaggtgggccgcgagctcatgatccctggcggggccaaggtgattgatgccacaggaaaactggtgatccctggtggcatcgacaccagcacccacttncaccagaccttcatgaatgccacgtgcgtggacgacttctaccatgggaccaaggcagcactcgtcggaggcaccaccatgatcatcggccacgtcctgcccgacaaggagacctcccttgtggacgcttatnagaagtgccgaggtcttggccgaccccaaggtctgctgtgattacgccctccacgtggggatcacctggtgggcacccaaggtgaaagcagaaatggagacactggtgagggagaagggtgtcaactcgttccagatgttcatgacctacaaggacctgtacatgcttcgagacagtgagctgtaccaagtgttgcacgcttgc

SEQ ID NO: 198 - DNA, 205 bp, Homo sapiens
  misc_feature (1)...(205): n = A,T,C or G
acacctgcggagaagcctgaaggtagatgaatccatgtattgtgatcctaatggtgaactacaacaggatactagaatgccacgcctgatagatgtctcactcgatgtcactgatggagccatgatcacaacgatactgatgagccatatacctgtcacatgtcacagaccgactgaagatccgacctgcatncctgcctaggag

SEQ ID NO: 199 - DNA, 405 bp, Homo sapiens
  misc_feature (1)...(405): n = A,T,C or G
gacagttacgctcgggggtatattccagctggggaactggagcgggttaaacagcgtccgtgaccacaataccatttggaagagctnctgtaaactggagcccaccctgaagaatgcaagaattgtgggtgaactcactggcttccggccagtccggcctcaggtccggctagaaagagaatggcttcattttggatcttcaagtgcagaggtcatccacaactatggtcatggaggttacgggctcacaatccacttggggttgtgcaatggaggcgggccaacctcttcgggaaaattctagaggaaaagaagttgtccaggttgcctccctcccacctctgaggactctagtgatcaccgtgtgccccaagacgactncccccccttcggccaatgatatgt

SEQ ID NO: 200 - DNA, 343 bp, Homo sapiens
ttcggcactagggaaagatttcaaaacagtactctggatttgtaaggggaatattaaccaatggtgagaaatttgggatccagtttccatttgatcttgatgttaaaattaaagcattgatgcttggagcaactttcctcattgaatacatgtattttgaactgtggccataagaattaccctgaaagaatatgtcagagattactggcatttatttttgccagccctcaacaaaactaagcaactttcactgaaaatatctaaataaagttttattttactaaaactattcatatatattctttctgcctaataaactacatcaaaaatgtttaacttcaaa

SEQ ID NO: 201 - DNA, 265 bp, Homo sapiens
tactgtttgttgagggggtgatcttctgtacttctccaaagatcatagctcgtcgggcttctcaagacctggtggacttgatctttgcgcataacctatgtgcagggttacggggtatacatacttcaaagaccgcagatgtctctgttcgagctctgtgcatgaggcctaacattccggcacaatccttgctaactgcatccatcttgggctgtactggcaagtggtgattacacaactaaatgttgttcctcttctgcttgga

SEQ ID NO: 202 - DNA, 121 bp, Homo sapiens
cgcctcctttgtggaagacatcccttctacccacggcgcctacttcttcttccaggagacagccagcgagttagactcttttgagaggctccacacataatggttggctagagtctgcaag

SEQ ID NO: 203 - DNA, 472 bp, Homo sapiens
  misc_feature (1)...(472): n = A,T,C or G
tttgagtgaggaaaaaattagatttaattccaattacggtctgttgcttccgtgccatgtgggctcctgaacaggtcacaaataaagaagcaatagtggtagagatatcattcagagtaccactatttcccaagatgtcaggtggatgaatacgataagtgtctttgcttcattaaggcaacacctgtaacaagcaatccagggttcctgtgtagccagaacatctgccatctcgaagcactctctgattcatcatacgtgtcctcacaacatcaacagggtttgaggccagggcccctgccagaccacaggtgaagcttgagaggaagtgggtatacacagtgtctcccatcaggcctgagagaataagatgcttcttggtgatgtcatagaccggcagctccacaccaacaacaatagcagccctctgcgcagtaagggacacacccttncacagtcctcttgtcccctc

SEQ ID NO: 204 - DNA, 565 bp, Homo sapiens
tttgagtctaagtgggaggaaaatccacatttatctgatttttagtatttaaattcttgaaaaaatgtatgctttattgcagaactagcactttaacaaaatacagacaataacactatcaaaatgtatgcaaatggcagctatgtaatttgtatgtttaacaagttaaatccatgtatttcttaatttactctcccgattacctaccaccaatatcaatatgaaagaattctttaattttatcatataataccaacaccaaagcaccccctgtaccgcgaagaacattggagaaggcgccacgaaaaaaggaactgattccttcatgttggtatatcttcacaaagcagtctaaaggttcctttatattgccgtttagcctcaccactctgcatcatcatacgtcttctaactgtgtcaaagggataagaaagtattccagagcatgtagtactcaacttgaggcaatgaaaaaggagacaagaaatggagtttttcttggctttggtaataaacccttaactgtgtcataagctccaaaataagaggctcggtacacaatgat

SEQ ID NO: 205 - DNA, 376 bp, Homo sapiens
gtcatctttgagtttagtacagtctccaaaatctatatgaggagggaggccacagtctattggcatacatgttgggatggaacttgaccatcctgactcttcacaggtctgcatggcatgaccagccacctgaaacccagggaagcaactgtagatgattatggcaccatagctgtaatctgcaccttctacaaaaccattttcaatgggttgtggggaatcacagtggatggcattgcaagatggggcatctacatcccaatcacctgtctctaaacaggtcaaggcactgggacctcgtgcccgaaagcctcggttgcaagagtaggtaacggtctgtccatagtgtaggtccgtgtaagagaatttgccattc

SEQ ID NO: 206 - DNA, 499 bp, Homo sapiens
  misc_feature (1)...(499): n = A,T,C or G
gcggccgcagcacagcaggtcgcagccgctgaggtccggggcgctgctattgcaggcgcgaccgcgcgtgccgggggagccggtgcgtcggttgggggcgcagaagtcgggcgaatcggcggcgtagaggaggtccgctcggcccggcggcttgagcgtgcggacggcgggcagcagggccttgccgtcgttggtgcccatgacgcgtgaggcgccgtggaagcgctccagcagccgcgcgcccacctcgcgaaatggaggcagcttctgccagcaggtgcgcagcgcgcatgatcccgacagcccgtggcatttgcactcggtgcgcgtgtggctccgcacggcctgcgggaggcagaggggcggacgcatgtggacaggtagggggtgcagggaagggcccagcggatggacagaaaataagattgggaatgggaggtganaggaagagaggaaaatgcagacaaaaggagaccgcaagttcagggggaggaaatca

SEQ ID NO: 207 - DNA, 517 bp, Homo sapiens
gcggccgcgtagtgtgctcccacacgatgcggctcggggccgttcgccctggagggcgcgtcggagccgccctggggtcttcgggggctgctgccagcaccttggctctttttccagacggcggcgctggaagccggcggcccgggtgcagcggccaggaagggggtcgtgaagggttccagcagcgggaatggcaggcccggcgctgatgcggggtcaacctccggggggcgctccggcgcgggcggctctcggtccagggccgggggtggcggcggggctgggctctgcgcatgctccgcgcaaacatgcaggtgcttgaagagcgagcggtgctggcggaagccgaggaggcagttctcacacttgaagtagcgattgggtttgtagtgcagtttgctgtgagccaccagctcctgcatgctggggaaggtctcggtgcagctcagggctgagcagcggaagagcttgccttccagggactgtgtgggcgggcagtgggttcgcagatgctgtg

SEQ ID NO: 208 - DNA, 517 bp, Homo sapiens; identical to SEQ ID NO: 207

SEQ ID NO: 209 - DNA, 401 bp, Homo sapiens
  misc_feature (1)...(401): n = A,T,C or G
ttttatttcatctttctctttattctgacaacattatgacattaaataaaatccaagaggtattggattagtccttgtttggtctctggtgatttagataaggcagaactgagcccctcggaatgtattatctcaaagagctagtagcagctgctatgcaaagttctaagggtcttgtgtgggagggcacgggctccagctcttgtgtaagaaagaacaggaatgagaacagctttattttgtagcgccaaggtctcactatgctcacacctgtaatcccagctttgagaagagatctggcaccagaagggtctggtagaagaaagtggggaaggtgaaggacaggaatcttttcctttctgctacaacctaaggacagaggcacatgactccagcnaggg

SEQ ID NO: 210 - DNA, 883 bp, Homo sapiens
  misc_feature (1)...(883): n = A,T,C or G
tcacatttaaattaaaactaaaataccaacaaaaattaaacagatcatcccaatgatcctaaaaacagggcaatacaatagactaaacaatttaaccaaacatctacctcaggacccaacaaaccacaacacccaaattgccaaaccacaaaagtcagcacaccccaaaacaaattcccccatgcacccccttaaccaacacaaacttcaacaccactatcccaccttcatgtggcacacaccaaccactaaccaaattactctaaatcaaccccaaactgaatgccaactgtttatttacttgtggtactggtttaataggtttttccatcaagcctccaatataaacagtgttgggaagcaggggccgggcaaaatcaaaggcaaaatcagagttaacaaaccacaactctgctttcagtagaagatgagacaaaactggcctagagccttctgggaaatgctccttgatggtgttgtcaaatgtagactgcatgtcccattggctcctggagaaactaaagaacatcagaaaattcttcactcggccccagaagtccatgtgatcagtcagcaaggaagggaatactggaacataagacaaggggcttggtagcccaaaatccaaagagccgaatgtggtgggaagaatggccacaaatggtttcacaagcttctcagcaatcaggaaagaacagaaatcaaatgcttcaacaaataccagatcatagttctcattctttaaggaatccattatatcctttctgcttagcaaataactacattgagtcccaaatatttccattagctttacaagggcttcagattcttttctgccatccaatgctgtttctatgtagctatcanaatgcttcttaattct

SEQ ID NO: 211 - DNA, 520 bp, Homo sapiens
gcgaccgcccccgccggagacagtgaccaactgtgcagacggcggcgtgctcggagcggtgcccggcgtgctaggctgcgcgcaggccctcgaggtgctcaagatcgccgccggcctcggctcctcctacagcggcacatgctgctcttcgacggcctcgggggccacttccgccggatccggctgcggcgccgccggcctgactgcgtcgtgtgcgggcagcagcccaccgtgacccgcctgcaggactacgaggccttctgcggctcctcggccaccgacaagtgccgcgccctgaagctgctgtgccccgaggagcggatttctgtgaccgactacaagcggcttctggattccggggcgccccatgtgttgctggacgtccggcctcaagtagaggtggacatctgtcgcctgccgcactctctccacatccctttgagtcagttggaacgcagggatgcggacagcctgaaactcttaggggctgccctccggaaagggaagcaggagtcgcgga

SEQ ID NO: 212 - DNA, 448 bp, Homo sapiens
ttaaggggtcataaaccagataggtagttttattaaaagatttaccctaagaacactccttctattcccatttctgacatcctacccacacccacattcatcgactaccatgtcttcataatgtcgtagaatgacattgtcattattgtcctggtagagcatggaaatgggagacagcttggtggggatacacacagcctgggggatctctgggtcaacggcatgcatcaggctgaaaattcacccctgagtctctatcttctttgaccagtatctccaggaataacccgaaatttttccgggggttgtcattccaatccttagctacatccagcaggttgaagtgaacagcaccttgtggccatgggactgaccgcaacacaaacattttacctggcttaggggtggtctggccccacacatgaggctcctgaaccaggaacagacc

SEQ ID NO: 213 - DNA, 588 bp, Homo sapiens
  misc_feature (1)...(588): n = A,T,C or G
ttttttttttttattgacatttcgatctaagtggtcataaaccagataggtagttttattaaaagatttaccctaagaacactccttctattcccatttctgacatcctacccacacccacattcatcgactaccatgtcttcataatgtcgtagaatgacattgtcattattgtcctggtagagcatggaaatgggagacagcttggtggggatacacacagcctgggggatctctgggtcaacggcatgcatcagggcttgcatgaaagcataattggagctgttgagagagatggtcagtgagaagggacactctccatggcagtaatttgccatgaaccccttggggccaatgatccacttgtgccaacccaggtcccggaagttaatgaatagctggtgacggtggcagaggttcttacaagaaagcttggggacagggatggctgctctccttttccgagaagggtgggcacgattcagggttgagagtcaccaccagcagggaagcatgaagggagcatcttagtctggcacaggtgtcttcaggctgaaaattcacccctgagtcncnatcttctttgac

SEQ ID NO: 214 - DNA, 483 bp, Homo sapiens
accacctcaaataaattagaagttcgaaattcatcaaacaaaactaattctttatttgggcaatatgataacattaatacacagataactttgaattctagcaactgtaaaatctaaacttaaatgttatttaccgtatatttagtgaatttatttttccctaccttcacgggacattaaaataggaaaggaagttaggttcaaaggagaaatggggctttgtagtcatcgctgccacctgaagccacctgcctctagccatggtcaacgccactgtgttcttttgacatcattgttgatggtaactcctttggcccatgcagctccttcgagctgtttgccgacaaagctccaaatatcagtggaaaactttcgtgcactgagcactggaggaaaaggatttggttataagggttcctgctttcacagaattattcccagggttattttatctgccagagtgctgacttcacacaccataat

SEQ ID NO: 215 - DNA, 482 bp, Homo sapiens
  misc_feature (1)...(482): n = A,T,C or G
tttttaaaacaaaacataagttaaatttattggagttgtccacagttgtcaatcgtggtcttctttctggttttgccattccagaaagcaaagtgcgccatggcttccaagatattcaagccctcttttgtcttgccaaagactgcactcttgccacccaaccacacagttttggcagtgcagatgaaaaactggaaaccatttgtgtagcgtccagtatttgccatggacaaggtgccaggtcttgtatgcttcaggatggagttatcatcatcagacttctcccagtagttggacttgtgccagtgtcatcatgacatgtgaagtcaccactctggcatataaaccctggaataattctgtgaaaacaggaacacttatagccaaatcctttctcttcagtgctcacaaaatgaacattttctggtggctttggaacctttgcgaacagctgaagggagactggcccaaagtgttcnccg

SEQ ID NO: 216 - DNA, 256 bp, Homo sapiens
cacagccaggacgagagcacctggtggcagagcccgtccatggccttcggcgtgcagtaccccacctcggtcaacatcaccctccgcctagggaaggcttatgagatcacgtatgtaagggctgaagttccacaccagtcgccctgagagctttgccatctacaagcgcagcgcgccgacggcccatgggagccctaccagttctacagcgcctcctgccagaagacctacggccggcccgaggggccagtaactt

SEQ ID NO: 217 - DNA, 256 bp, Homo sapiens; identical to SEQ ID NO: 216

SEQ ID NO: 218 - DNA, 433 bp, Homo sapiens
  misc_feature (1)...(433): n = A,T,C or G
nnnnnnnnnnnnnnnnnnnnnnnnnnnnnnnnnnnnataaaatggggcttttatttttacttgaaaatatgaataaatgggaaggtgttctttatttccaattcccatccccccatcccctgccacataggaggacttttggtgcccacctttggccccagcctttttatttggggacagggaggacagcacccccatgccttgtccacctggccttacctgagcctgcaggactgtcttttgctccttcaacactttcgcctgaagtttccactctggtgcctggttcagcaaatattccttttctcgtttggggcgctcctccgcttccttcatcatttcttgggcctgctcaagctttggatccaccaacttctgctggagttctctgtgtttaaatattttggccaaatgctcctctctgagctcatac

SEQ ID NO: 219 - DNA, 208 bp, Homo sapiens
cgctaggagggagttctctgtcaatgagaggtagtcattacttcggaagtggtacaattcaatgttacaatataaggatgacctctccagaagaatcacagcttaaagtggatatccactgaaggaggcacatggagaaatgctcttttccgcctgtggcctagagctggtctccgaggaagcccgccgcgtttacggagacattatc

SEQ ID NO: 220 - DNA, 214 bp, Homo sapiens
catcgtgacgtggaacttcccgataatgatggcctgctggaaactcggaacggagctgtccaacggtaacacggtggtcctcaagacgtctgaaaagtcgacgctgaacgaaatcagaatcgccgagctggcgattgaagcaggtatcccgaaaggcgatgttcacgagctgccgggttatggccacaacgtgagtaacgccctgagcatgcac

SEQ ID NO: 221 - DNA, 519 bp, Homo sapiens
acctgcggtactggtggtcaggtgattcgtctgattccgcctctcacaatgagtgaagaagaaatgaacaaggccctcgacattcttgaaaaggccatgaccgcttagatcgcctagatctccaattatttctcaaacaaatccttagaggaaaatgcaatgagtacaagcactccaagcaaaccggaacaagcgacactataggccggcaagccgcaaacctacggaaactatatcaacggccgtcaagtcaaatctgaatcaggcgagacttttgcgtcatacaatccggccaagaacgatgaagtgataggctttttcccgctatccactgccaacgatgtcaaagcagcagtagatgctgcccacaaggcttttcctgcatggaaagcaactcctgctccccatcgcgcagagatcatcctcaaggctgctcatctgctcgaagctcgcaaagaagaacttgctcagaccatggtccgtgaaaatgggcaagtcttgaaagaagcacgtggcgat

SEQ ID NO: 222 - DNA, 192 bp, Homo sapiens
ccctacgacactgaggaagaactgctggagttgatgaacaacacgccttacggcctgagcgccacgctctggaccaacgatttgagcaaggccctgcgcatggtgccggcgatcaacgcggggacggtgtgggtgaatatgcacacgatgctcgacccggcggtgcgtttggcggcaacaagtcttcgggtc

SEQ ID NO: 223 - DNA, 292 bp, Homo sapiens
aaaatcaagaaaagaaaaattttgtctttaaaatcaactaaatcagggactgaaaagagatgccaagctattgaagagcttctctccacaccagaattgtccatatgagtccccccgagagattttcactgtgactgttttgacctctgcatatccaaggaaaccgttctctcccaggtctctttcagacccagaaaacctgaatcccccaaaagggcactgggcacttaccacgccatagccattaacccacacggttcctgtccgagagcaagaaggggattgttatggc

SEQ ID NO: 224 - DNA, 169 bp, Homo sapiens
tacaggtagaactactcatggactgtttccaggcatcactgtgagattccctgagggcaaaagggtgcttttcgcctccacaaggacgttgaagctcagccccacccgatggaacggagacacttacaaggccacagtctgatcctagaggtccaagccagcgatagag

SEQ ID NO: 225 - DNA, 124 bp, Homo sapiens
tcattttatcgttatacttcatgcttctatctgtatcttggattattttttcactaccagttttccatccatcatttcatacttctccgtgtttgtcattgtactggaatgcttgaaccatacg

SEQ ID NO: 226 - DNA, 223 bp, Homo sapiens
tgatcttggtggccataaagccgccgacctgtgtgagcaactccagcatcttgcgcatcaacttactgtgccctacagaaccctgctccagccgcgaggagccgactgagtcaatatcatgcatgacaatgatatatagagcatgttcccttgccatgacaaacagctccctcaccattgttggccctgttcctatgaatgtatgctcgaactcagagccaga

SEQ ID NO: 227 - DNA, 142 bp, Homo sapiens
cattggggggggggaattcaatttttctgtcaatgccccctgggctaaacagtgccgagtccaggatattaatcctattagtagccatgataaccttgatgttcttgggggcctcatagctcgctagctggttgaccatttc

SEQ ID NO: 228 - DNA, 329 bp, Homo sapiens
  misc_feature (1)...(329): n = A,T,C or G
nnnnnnnnnnnnnnnnnnnnnnnnnnnnnnnnnnnnnnnnnnnnnnnnnnnnnnngggggaatttgaatccattgctcctcgggggggtcatgaaaatacaggagttccaaaccgggttgttaaccagttgctgactcagttggagggagaaaaaggcttacagggggtttatgttttggctgttactaacccccctgacttgattgaccctgccctgtttaggcctgggcaactaaaaaaaggggtatactgcccccctcctgatcaggggacaatttcatttttagaggccaaaacccaacaaaggctacactttttccttgggagc

SEQ ID NO: 229 - DNA, 221 bp, Homo sapiens
  misc_feature (1)...(221): n = A,T,C or G
nnnnnnnnnnnnnnnnnnnnnnnnnnnnnggaagggacaccgatttattgagtaccaaacctgagggaaggtaaggctgcactcaggggctactgccttggccaaaagggtcttgccggtgccagggggcccatggagcaaaaggcctgagcgtttcaggcccaggctcaatagtaaagggtgctcagggggagctgaatggtctcaaggatctccttctt

SEQ ID NO: 230 - DNA, 426 bp, Homo sapiens
  misc_feature (1)...(426): n = A,T,C or G
ctaaccgattttttattgcgcacttaacccgagaaactggggctggcctgtgtgccctaagcgtaatattgtaggttggctctttttttggctgcacctccaggatgccttccatgtattccttcggggggagcttccgggcaccccttggcaatgtgattatgcccgccttcacacacaacaccttgcactgggccccattgaagtcattttgtgcaggggccaccttcttgtagttaacgtaaggactagacattcattcttcgggagtggatttgcatgaatcttgcccgggccttcttattgggcatnggaactctattttgggtcaaaggcggccgagcggaggagggccgggccaggatgccaccctgtttggggctgcattaccctaattgggggtgggctgaagccatccaactggtt

SEQ ID NO: 231 - DNA, 424 bp, Homo sapiens
tatagtcttctgaatcatctaggtttttccaataaaaattttttcaaataaaaattacacattttataattagaaacaaagctacttccattaagaaatctgtaaaatataaattatttgtatgtaagtaaactggagataagtgcatcaatagagactcaccatagcaaaccacactcacctgcttcattacacaagactttcaagtctgctccaacgtatccatgagcactatttgccagctgcagcagctcagcctcagtgagcaaatggggtaccttcgaagcagtttctggagaatatctagccggtcctgagcattgggaactccaatctcaatctctttatcaaatcgcccaggtcttcggagagcagcatccaaggcatgagggcgatttgtggccccaagaaccaacacttgtcc

SEQ ID NO: 232 - DNA, 358 bp, Homo sapiens
ccttctgcatgaccttggctactgcactctcaaagtcctcctgagtgacatggactccccggtctccgaggggataaatgccagttttttggaaaaggcccttaatttaagcccctgttgtcctgggatgagctcaggaatttttctcaggttgattccccgggtcagggttcatcttccgggaatggatcttcaaaatgttcagccgggcctcctcaatggggggggggaattcaatttttctttcaattcggccctgggaaaaagttggcggagtcgaggataccattcctattagtggcaagggtgaccttaatgttctgggtggctcaaagccgtcgagctggttgagcaactc

SEQ ID NO: 233 - DNA, 430 bp, Homo sapiens
  misc_feature (1)...(430): n = A,T,C or G
atgccgccttcaatgtgaccgtggtggctaccaacacgtgtgggactccgcccgaggagtactgcgtgcaactggggtgaccggagtcactaagtcctgtcacctgtgcgacgccggccagcagcacctgcaacacagagcagctgattgagatcgcctccagggagctcgagaaagcaaaaatggctgccgccaatgtgtcaatcactcagccagagtctacaggggagccaaacaacatgaccctcttggcagaagaagcccgaaagcttgcagagcgtcataaacaggaagccgatgacattgtacgagtggcaaagacagccaacgagactttatttgtggtatgttntgtgtgttcgagggttgtgtctggtgtngtgtttgctgtgctggagattgaagaacttaaccggaagtatgaacaagc

SEQ ID NO: 234 - DNA, 567 bp, Homo sapiens
ttaacctctttacctatgatgaaaatgcccagtgtgcttttaaagcattcagtctatattttggagggaaatatacaggaatgttgatataatgctatttactattgatataatactatttactaatagtgtactactatttgccacagaatcaatccaatgtaaagacaatttatgctgggccccagtaaagggcagagctaaagttgtttaattataaaaattctacaagtatcttattacaaagcagatgaaactggttcccaggaaagaatcctagcaaggttctagaatcgtctggatgccgatgaccccagtcatctagccgcccagggcaccaccgcaaggttcctcccacattccctctgagctcaccacaccttcattacacactgcctggccgcgtgcaagtacctccgattcctgaccaaggagatggaatgcgcttgtccatcactgcaggtacccgtgggagcgtgcaggagagctattctcaagcctgtcccatccccaggattgacatgtacctcaatgttgcctcccatcagcatgacggaaaagaaaggc

SEQ ID NO: 235 - DNA, 567 bp, Homo sapiens; identical to SEQ ID NO: 234

SEQ ID NO: 236 - DNA, 133 bp, Homo sapiens
caaagtacttataaggcttccatgtattcccaaagtcctgggagcggtcaagcaacatggcaacaggcctgggggacttgaacatcccaatttggtgagtgaagtcgaattcagcttccaagtctaactggat

SEQ ID NO: 237 - DNA, 389 bp, Homo sapiens
tttttcttaaattaaacttttattaatcttccagatatcaacttttgttggaactcagagttatgaatggccctcgccatgccgatgctttctgattaagcacctctgtacccaggcaccggcagattcggcaggggtccccaggtgttgtccactcttggccatgttcccagtgagagccaccttctgtgcagccttggcaggttgggcagcagtgccaaggcctcagcactggctctgggcaggggctaggcgggcacttcagggccatgcagcgaactcggctcctcaggcaggtgcactgtagacaagggttggagctggacaggaaggtgaccccctcctcataaagctgcccctcataatcacagcctggcttacagtgcggg

SEQ ID NO: 238 - DNA, 389 bp, Homo sapiens; identical to SEQ ID NO: 237

SEQ ID NO: 239 - DNA, 422 bp, Homo sapiens
  misc_feature (1)...(422): n = A,T,C or G
nnnnnnnnnnnnnnnnnnnnnnnnnnnnnnnnnnnnnnnnnnnnnnnnnnnnnnnnncggggggagcatgggggtttttatggccttggctccagctcccaacactgccgcctccatgcccctaactcacagaaaaaaatcccggaagctgccctcccactcagcctggttgaaaaaatcgtaaaaggggcacctgaaggtaatgagcacaaagccaaaggccaggaacccaaaaatgcctgtggaggacaggggcaggacaggacgttaccaaccccattcccccancancagtggggaggaaaaagtttgccccactgggcctaaaagttcacccaactggggctggggggaactcatgctgggctcantccaaaaactgctttttttaaaataaaataaaaagggcccttgaagcaact

SEQ ID NO: 240 - DNA, 317 bp, Homo sapiens
  misc_feature (1)...(317): n = A,T,C or G
atcgcgaactacattatcaagtgcaacgctgcacttgctttgaaggctgnagaacgctcgtccatgtatgatagagacgttgcagccccaagagctcgatcgagtgccgatcaagatcattggcagctcgatgttccacaccggatgccgatgacccttgttanagctgatcctgagggtgattttccgagtatcttggcacatgaaggtgctnnaatgtatgnagagtcttggtcgcntagttactaaacgnaagncagtgtacagctgcatcgcacttgacatcccacatntgtnanaagtcaaattgtgtctaa

SEQ ID NO: 241 - DNA, 717 bp, Homo sapiens
  misc_feature (1)...(717): n = A,T,C or G
aatcttcctctgaactaggtatgattttcaatgaacgtgatcaggaattgagagacctgggctaccagaagcacgcctttaatatgctcattagtaaccgcttgggataccacagagacgtgccggacaccaggaatgcagagtgtaggaggaagtcctacccgactgacctgccaactgctagcattgtcatctgtttctacaatgaagccttttctgccttactgcggactgtgcacagtgttgtggaccgcacaccggcccaccttcttcatgagatcatccttgtggatgacaagcagtgacttttgatgatttaaaaggagaactggatgagtacatccaaagatacctgcctgcaaaagtcaaggtcataagaaaattgaagcgcgagggattgatccgaggacgaatgatcggagcagcccacgctacaggagaagtcctggtgttcctggacagccactgtgaagtgaatgtgatgtggttacagcccctgctggccattatccttgaggacccacacacagtggtgtgccccgtgattgacatcatcagtgcagacacacgtcnttacagctcatccccagtagttcggggaggtttcaactgggggctgcacttcaagtgggatctagttcccgtatctgagctgggagcctgacggcccacggccccaataaggtcacctacaatggctggaggcttgtttgccat

SEQ ID NO: 242 - DNA, 388 bp, Homo sapiens
taatggaaaaaaaaaatacagaagaggttttgttctcatggctgcccaccgcagccctggcactaaaacaggccagcggtcacttctggctggagaaatattctttgcccttttggacattaggcttgaatggtatacatggcaggtttccaggcacaggtgggcaaaattaccccatgttggtaagtgaactggagggcctgaataatctccaagtctcatccccgggcaggcaacaggaaggtctttacagtgatctgccgaagaataccttatcatcactgctaaaagggccccttaacgagatgcctaatcagcctttaagacgcctaatctctggcattgttgccttggggtttatacagaggaatttcatgggccaagcctc

SEQ ID NO: 243 - DNA, 106 bp, Homo sapiens
gatcatgtgaactggaaccaggattttgaacgactaaagcctttacgacctcccctctggtagggtctgggcagttgacaatagttgatgcttcaacagaagggtg

SEQ ID NO: 244 - DNA, 211 bp, Homo sapiens
gcctccaggtatcttgacacacagcctgggacatttatgccgacaggggccggagggactgggcccggctgtccattacaaacagatggtcaaccacgatccccacattgaagccctgaggcaccaaccgggtcttcatcaggttgaacttgcttttgacctccatggcgtcctggatgcgagtgaaatggtgggtagcgtatgctgagag

SEQ ID NO: 245 - DNA, 115 bp, Homo sapiens
cgaacacctgctgcagccggcagccgagcacgggcgtcacgcgttcggcggcgtggtccatcagtcgtgcgccgccgacctgcagcacacgcaggctcgacagatcggcctgccg

SEQ ID NO: 246 - DNA, 358 bp, Homo sapiens
gatgcaaaggatgctgttgacttgatgaaggctctacagttcaagcaggtctccctcctgggctggagtgatggcggcataactgcgctcatcgctgctgcaaagtacccatcttatatccgcaagatggtgatctggggagcaaatgcctatgtcaccgaggaagacagcaggatttaccagggtatccgagatgtttctaaatggagtgagaaggcaaggaaacccctggaagccctggtatggatatgactaccttgccaaaacctgtgaggactcgggtggatggcataagccagtttaaacaactggccagagggtaacatctgccggcacttgctgcccctggtccagtgcc

SEQ ID NO: 247 - DNA, 374 bp, Homo sapiens
caaggcttgggaccctggctgcctgccgaaaccctgcgcaccctcagaattggggggttctaagctctttccccaatacccggttttcggctacacgttctcaaaatgaatttttgttcccctgagaactttcgggtcctgataaactccacggattcccaaggaaaattccaatggccgtttggggaacttaaagcttcttaggtttcgggaaaaaaagttccatatattgggcaaattcccccagggcaattttttaaaaaccggaaccggaattttttccgaatttttccccagtttgagaaaccacccgggtgtacaattttttgggccacacacttatgtggaaaattttggggttcttccattatgaa

SEQ ID NO: 248 - DNA, 312 bp, Homo sapiens
gtccgcccatcttcacatttggggtctgctgtgcgagaagctcaagttccacaggcaaggttaacctcattcagcaatgggggcccaaaacagtcggggagtcctgaggcaaggggggaagcgaaattggggtggtgttgggcaatggaacggggtccagttgctaacggggcaatggcagaaatccacgactgggctggaatccgcagccgggcgcgggttggaaggaagggccctagaagaagcgtctgcgggccccttcagtgccggagcttcccggagggattggccgaatgggtgcggcaatgttcg

SEQ ID NO: 249 - DNA, 471 bp, Homo sapiens
  misc_feature (1)...(471): n = A,T,C or G
gcgnccgcggcattcccctacgagggcaactacaccaaatatctcgacgccaaggccaagcgcctgatccaggaaggccgcgagacgaacgcccgccagaagtcgatctggcgcgacgcgagntggatccagtcatcgcccaagggcgccagaccaagtccaaggcgcgtatcaaggcctatgaggaattggtcgagcagtcgcagaaccgcaagccgaccgacacacagatcgtcatcccgtcgagcgagcgcctcggcaatgtcgtcatcgaggtcgagggcctcaacaagggcttcggcgacgagcttttgatcgagaacctgtcgttccggctgccgcggccgattccgtccggcgtcatcggtccgaacngcgccggcaagacgacgctgttcaagacctttcaccggccaggagaagccggatgcaggttcgattcgcatcggcgagacggttcaagctcggcta

SEQ ID NO: 250 - DNA, 286 bp, Homo sapiens
gcggccgactaccaccaccaccccccccccggccgcgtcgacgctggatttgctctgcggcaagacccgcgccaccagcggcagtatccagttcgacggccaggaactgaccaaaatgcgcgaatacaacatcgtgcgggccggggtagggcgcaagtttcagaacccgtcgatctacgaaaacctcacggtgtttgaaaaccttgagatgtcttatccggctgggcgcaaggtctggggtgcgctgtttttcaagcgcaatgcccaggtggtggcgcgggtcgag

SEQ ID NO: 251 - DNA, 351 bp, Homo sapiens
gaccaactattagaaataatacagaagctaaagcatttccttttctgtaaaactgaaaagcaatgaaccagttgaattaaaacatcagaagtcatcaattgtgtccttttccccaacagaaatccagatggagacgtgagcccctggtgctatgtggcagagcacgaggatggtgtctactggaagtactgtgagatacctgcttgccagagtaagactgtaatacccaatgtgatggtttacaggactgtgaacactaaggagtgcgtaggaggggaggcccctgccagaggttcaggtagtttagggctggtgggatttcatgggagcatgttgaaaagggagaagccc

SEQ ID NO: 252 - DNA, 422 bp, Homo sapiens
ttttttttttgcggcaattgtatggtacttttaatgggaatatttcaaaggccctggttatgaccttgttacagcaaaacggagagggtgctgggtgcccctgcatattgtcccacctcttgtgacgtatatccttttggaatttccagtgacttgatcatgaactactgcaggaatccagatcctgtggaaggcccttggtgttacacgatggatcccaaagtcagatgggagtactgcaacctgacacgatgctcagacacagaagggactgcagtcgtgcctctgactgttatcccggttccaagcctagaggatccttccaaaccaggtaagaagtctgtggccagacatctccacacttggacactgggtagaaaagcctttgaaactcccattgttgcagaagccttcagtgctac

SEQ ID NO: 253 - DNA, 103 bp, Homo sapiens
  misc_feature (1)...(103): n = A,T,C or G
gctgtgccgccagcgcattntgggcaccgtggggcgcgagaaactgggttggattccccttaaacccgtgcttcgcgaataactgaggttctttccctttcag

SEQ ID NO: 254 - DNA, 998 bp, Homo sapiens
tttttttttttttttgacaggccaaaggaattgctttaattgaggtcacaggcatcacaggggtctgctcagcttcctcgccaccagggagaaaagtccttcgttgttggccatggtggaagaataactttgcgagatcacctcaaaccattcgattgtgtagccagcctttttcacagcagcctttactgcctcccggcccagggggaggctggagaacttctgctcaccaatcatgtagtagctgctcttgagcgcatccatgatcaccaggaagccccctggcttcagtaggctgccgaggttcctgagcgccctgcagtaggtggggaggtctgggcaggcggcatccagacacagtgtgctgagcacgcagtcagccgggggtaaggggacggcccccagtggctggctctgagtcacatcacacttcagcacctgcttgaccgcctgtctcaacttctcctccttctctggacccttgactctgttcccttcaagatcacacacataggtcaccactggggaccagtcaaaggcctctggctctttcttcagccacttctccagctcctgaggttctggtctgagagcaaggacgacggatctccttaaaggattcacaagcagagaggagctgatagatagtggggccagagccgatgtcaatcagcaggtctcccttcacaccgtctaggcagaatatcttgaaaagatttttcagaaggtgcttaagaatctggctttctgcagagtgcctagaaccaaacttgtaatatttttctaggtaatccccgagggtttaaaatgggcttagataggtgtccttggaggtgaagcctgattccattatgtctcacttctgtaccactggagcactgccctccttctctttcctccagaagccagggagtgaccctgcagaagttgtcttcctgagtctcaggctaacagcattccttccatcagttcagcccttcttttagaacagatcggac

SEQ ID NO: 255 - DNA, 103 bp, Homo sapiens
taggttgaggcgccagtggttggctcagagtcacatcacacttcagcatctgcgtgaccgcatgtctcaacttctgctccttgtgtggagacgtgcctctgtt

SEQ ID NO: 256 - DNA, 190 bp, Homo sapiens
tgctattgagcgcatacctgaccaccacgaagccccttggctcaaataaggggcctaggatcctgagcgccctgtagtacgtggagaggcctgggcaggccatatccaaacacagtgggattatcacacacccatcctggggcaagggggcggaccccatgggttggctatccaacgcaaggcacttcaa

SEQ ID NO: 257 - DNA, 468 bp, Homo sapiens
gctgtgggggccgaggcgtgggcgtagacgcggcgtccggaggcggggccgggagcgcggcgacggcggctgcccgagaggctccagggctccggggacaccgccgggccgggcagaccaatggcagcaccgagcatcaccacggtcgcgggcttgcccgaggatggggcgcaggtgccctccggggtgggcactttcaggacccccacgcggctctagtggcaaaaccggggattcttcctccgccatccaagccggaggagcgcgtttgaggggtccgggagaagacgcgacctcagatcaagctagaacttcacgcaccagagagaggagttgtgtctataaaaggagtgccgtcctaaccgctacctggctatgaaggcagatgcaagactactgggttctaaatgtgttacgcacgactgtttctttgttcgaaggattggaatgtaataagtacaatactta

SEQ ID NO: 258 - DNA, 428 bp, Homo sapiens
  misc_feature (1)...(428): n = A,T,C or G
ccacgctgcccnccgtacccaagtatggcgtcacgtcgctgtcccgccaagccacttcacggaccccaagcgtctttactgcaagaacggtgtcttcgtcctgcgcatccacccctactgccgagtttacgtggtccggaataatatctaccctcacatcaatctacaacgtcagacataagagacattagttgtgtctatcaaaggagtgtgcgctaaccgttacctgtctatcgaagaagatgtaatattactggcttctagatgtgttacggatgactccttcttttttgaacgacttgtatctaataactacaatacttacaggtcagtgaatcactatgtggtattggcactgaagcgactgggcagtataacctggatcgaaacaggacgtgtccagaaactagactttgtctctaatgtct

SEQ ID NO: 259 - DNA, 385 bp, Homo sapiens
  misc_feature (1)...(385): n = A,T,C or G
ggacggcggctccccgcgcggatccagcggctcgatgatcccggccgggccccgcaaggaccatggcagacgggagcatcaccacgctgcccgccttgcccgaggatggcggcagcggcgcctacccgcccggccacttgaaggaccccaagcggctgtactgcaaaaacggnggcttcttcctgcgcatccaccacgacggccgagttgactgggtcccgtagaagagcgaccctcacatcaagctacaacttcaagcagaaaagagaggagttgggtgtatcaaaggaggggagctaaccgtaacctccctatgaggaagatggaggaatactgctcttaattgggtacggtgaggtgtctttttggacgatgggacttaata

SEQ ID NO: 260 - DNA, 560 bp, Homo sapiens
ccgcgctccccgtgcggctccagcggatcgcggatcccgtccggtccccgcagggaccatggcagccgggagcatcaccacgctgcccaacttgcccgacgatggctgcagccgcgccttcccgtccggacacttcaaggaccccaagcggttgcactgctaaaacggcggctccttcctgctcaattcacgcctaccggacgatattgacggctcccgggagaagagcgagcgtcacatgaagctacaacttcaagcacaagagagaggacctgcgcctatcaatggagtctgagctaaccgtcacctggctactgaacgaagatggacgattactggcttctaaatgtgctaccgatgagcagtagctttctccaacgattgcaatatactaacaactatactcaccgtctaggaaatacaccggtcggtctgttgcactgaaacgaactgttgactataaacttcgatccaatacagcacctgggcagacagctatactatctcttccaaagtctgctaagagctgtgataatcgccacacctaatctcactcacat

SEQ ID NO: 261 - DNA, 466 bp, Homo sapiens
ttttttttgagacagcaggctggagttcagtggcacaacctcggctcaccgcagcctctgcctttcaggagaatcacttgagcctgggaggcagatgttacactgaactgagatcacgccactgcactctctagcctgatcaacagagcgagactccatcacacacacacaagaaaaattaaaaaagagttgggtgcacctggatctaacccctgtctcatccttctgccttgaaggccaaatgcaccctgatacttttcaccaaagagtagaaacaccaccatccacttgaccccaaatgtgactttccacaggatgcaagcacagtgttggaatagccaaagacagtaacaatagaagtgcagggtgagggtgatgaacaggacacactggagagcctgacattggcctagactacgggggtgtcttgatccttcacaagagcccaggaggcaacccaagagac

SEQ ID NO: 262 - DNA, 499 bp, Homo sapiens
ctttaattaaaattttctgcttgttttcctcaaactttttatctaaccccaagccgaaaaacgatggacaaaaacaagaacactgtcttgggaacttcatggaaaaaggggggagagaggagggggaacatggggctgggtctccaggcccctcccaagaagaccttacccttgaagcacccttttggggggcagcatagccagaacagccccccccccgcccagcctccgactgaggaagacggcagaaacgcactggggggagggccagaaggcttgcagggggcaggggccggtcggggttacaggaagcagtcggccccgggcttcttggaggggatgccccgtgattgttggggagcacccttagggctgaggaaatctgtccggagaccctcgtgcagctccagagatgggtgcctcattcccacagggggggcagtggttgggtgccagccacacagtgagcaccgagtgattgaaggcctctcgtaacctt

SEQ ID NO: 263 - DNA, 367 bp, Homo sapiens
agcactttattgagttcctgcgccatcctggcgcggacctggccgcactgcgggaatgggacacaatgttgccttccatgcccgagacactctctacctgctgaatcaccacggagggaatgatgagtccctgagcgattatgaagcggtgtgctcccggatccacaccaggtattaggccatatccttgtagacgcctggcttggaggctgtacccacaggcccgatccccagctgatgatgccttgccaaggtgagccggcgctctgcagcttggtcctcgcacacgatcgggcctgcggaacactctggcacgcttacgaggccgcgtcgaagaaccctgctccagcatgccgggagattggag

SEQ ID NO: 264 - DNA, 725 bp, Homo sapiens
  misc_feature (1)...(725): n = A,T,C or G
nnnnnnnnnnnnnnnnnnnnnnnnnnnnnnnnnnnnnnnnnnnnnnnnnnnnnnnnnnnnnnnnggggggcccagctgtttaaattaaaccccccccccctgcccagcaggaaaccccttataaaaaacccaaacccccatttgggggtttccccttcaccccgggccccccttgaaaaagggtgatggaaaaatctcgggcgggaacaggaccccgcttttgccccttttggtttttgcaaacatccactaccccccagntgattaccccaacttgaaggaaacaactttttttgggaactataaaggggcccccaaaatcccccttgcaagttttgggggcagaaaagggacccccccccccantacaaaggaaccggggggggaccccccttgaaaagtccttgactttgncataaccgggggcatattgagcatttttttaacagctgccttttttatccccattcttgagggaaacccccttccgaggcagntttttctcctcctcacacacaaacagagctttgatatcccgtgcagggagcaacttcttcctttgttgctggcaagggggagttggaggaagccccaaaacccccagtgttccctccgggccggagagacaaaaggccccgatatctggccataattcaaccttattctggggctgacaggggccacgccaagccctaaaaaaacagaattccccgcttctttttccc

SEQ ID NO: 265 - DNA, 533 bp, Homo sapiens
caggcattgggcccgcagcgactcccgcctgcaggccagaggcacagtcgctctcccagtccccgagggacagagagacacctgcagcacggcaatcccctacacctgtgaggccccctaagcccgcaagccccctacacctgtaacctcccttcacctacaagatccctgcacctgcaaggacccctacacctgcaacttccctacacctgcaatctccctacacctgcaacctccgtacgcctgcaacctcctttcacctacgagatccctaaacctgcaacctccttacacctgcgtgacgtcaccccggctgaggcgctggcagaaggcggtgcgggtggagccttcgccaacgtcctgggccccctgagtgctgcatgccagtcctaccagccgctcggtcatctgccaccgcccagcaatggcttcagcatgcagtccctgctaggggactccagggaggagcatcctggccagggctggtgccacagagcagcccagcttctgcaggcaggactgtgccatcaaca

SEQ ID NO: 266 - DNA, 265 bp, Homo sapiens
ttagagctatggcccttggagtaccaaatgattgctgtaccttccgaactactatctctaggtggcaacaccaaaaatatttctggaagcatgtgatgagacgagtgatgaatatcgagcccatcgcgctgactatacagaacacggcgtgtgccgcagaatagcttatagcaaagacgcccttctccacgtgggtcttggaaacagcatcttcctccacgtgactgagatgactgtgagaggtcacttacaaggatgctcgcga

SEQ ID NO: 267 - DNA, 312 bp, Homo sapiens
  misc_feature (1)...(312): n = A,T,C or G
atgggggaaacatgtttatttttattgtttagggctccagaaattgaggtaggtaaagatactaaagatcagtcatgcaaatttagcagaggagagatggtccagattgatatggagagagatggtccagtttaattcttttactccatagtaactggtagaccaattctagacgnccattttacaattgcctccagtatttgaacttgcaaacaaaggngaacttctccttacaaggatcatccttccatttcttgaatccnataagacaatgagaagnttcagactttaggggatcagagtgtattaccc

SEQ ID NO: 268 - DNA, 328 bp, Homo sapiens
  misc_feature (1)...(328): n = A,T,C or G
ttttttggagaaacgtcctttattgttgcctctggggattcaaagcccaaagagggcagggatggaggttgaggatgcacaacaagaggtttacaccaatcttatggggtaggggcctaggtcagcagctctgcctcttctcacagatgtaaacaggagactctgatttgcaagaggagttgctccagtgtccctggtagagcatcatcacacaggnctgggtggttccattatcatccaatttcctggagtcccagtttatgtaggtgggggctgagccatccatccacctgtgggcacttccttggccatctttgaagaggcctat

SEQ ID NO: 269 - DNA, 472 bp, Homo sapiens
tgcatgggcaccttgccctccagcttcaccccatagaaatgggccagcactttgcccgctgtctgccggaggagcggtagcgtgagcagcaccctgcccgcccgccgacgttcaacaccccctccggtgccagccctgccggattcatactccatcaggccctcttgcatagcttctcgcagctgctccacagactaagcatcttctatgtgcacagagtctgaattggcaagggccaaggcctttactagaacatactcctatcgctccatccgcagggcctgcagccgacgcactagttgcagcagggcagctccccaattcccccagtccagctggccgtgccccctcttcatccaggactaagtactcagcgaaggccagctcatcctgcagcgtcagggagcgctgagccacacccagcaccagcacctccatccacacgctctgcagtactgacatctggtcagac

SEQ ID NO: 270 - DNA, 472 bp, Homo sapiens; identical to SEQ ID NO: 269

SEQ ID NO: 271 - DNA, 383 bp, Homo sapiens
ttatttagtttttatttcataatcataaacttaactctgcaatccagcgaggcatgggagggaacaaggaaaacatgggacccaaaggggaccgccggggggcgccaagaatccagggaaccggcgaccaaaggggggggaggggggcccccctgaccaccagagggaaggaccggggggtaaagaaaaaacacaggccaaactaatccgggtggcccaaggtcgccatgggggacctcctggcgggcctggcaatcccgggcccaaagcggcccaagggcccccacaaaaatcatgccttccttcactttgccaaacaccacatgcttgccatcccaccactcacgcttggcagtgcagatgaaaaactgggaaccatttgt

SEQ ID NO: 272 - DNA, 430 bp, Homo sapiens
tatttcataatcataaactaaactctgcaatccagctaagcatgggaaggaacaaggaaaacatggaacccaaagggcactgaagcgagacatcaaagatactaagatactacgatcaaatgaggtccaggggtgctctcctgacctagagccggaatgctctggtggttaatataaaactcaagtcaaacttattcgagttgtccacagtcagcaatggtgatcttcttgctggccttatcattcctggacacaaagcgctccatagcctccacaatattcatgccttcaatcacttagcaaaacaccacgtgcttaccatccatacactcagtcttgggagttcatatgaaaaactgagaaccatttgagttgggtccatcatatgccatgtatcaacataccaggatccgtatgacttaggatgaag

SEQ ID NO: 273 - DNA, 208 bp, Homo sapiens
  misc_feature (1)...(208): n = A,T,C or G
gaaaccattctgtgntaggggtccagcatttcgccaatggaacaagatagccaaggacgccgattgcttttaggaagaaagtcttcatctttcaaatttcttcccatagattgacttgccaccagtggcattatgtgcgtgtgaagcaaccaccttacacataaaccctggatatatctngaagcacgaacactataaccaaatcttt

SEQ ID NO: 274 - DNA, 482 bp, Homo sapiens
tttttattccaaaaccaaaaacttaactctgcaacccagctaggcatgggagggaacaaggaaaacatggaccccaaagggaacttcaccgagacccaaaaattctaggaaactgcgagcaaatggggtgaaggggtgcccccctgagctaaagaaggaatattctgggggttaagataaaccccaagtcaaacttattcgggtggcccacattcaccaaaggggacctcctggcgggtcttaccattcctggccccaaagggccccatggcccccacaatattcatgccttctttaacttggccaaaccccccatggttggcaccacaccactcagttttggcagtccagatgaaaaactgggaaccattttgtgtggggcccagcatttgccatggaacagttcccaggacccctaagctttaggatgaatttccctcttaaaggttctccccatgaggggacttgccacagggcccatt

SEQ ID NO: 275 - DNA, 428 bp, Homo sapiens
  misc_feature (1)...(428): n = A,T,C or G
actattgaacccaaatggatctgttgcgagacatcaaagattctatgatactgcgatcatatggggtggatggttgctctccttagctacataatgtatgatctggtgtttaagataatacacaagtcatacttattcgatttgtccacagtcatcaatggtgatcttcctgctggtcttgctattccttgatccatagcgcttcatggtctccacaatattcatgccttctttcactttgtcaaacatcacatgcttgccattcaaccactcatttctggtagttgagatgaaaaactggtaaccanttgtgttgtgtccatcatttgccattgacaatatgccagtacccttatgctttatgattaagttctcatcttaaattttcccccatagatggacttgccaccattgccattattgtgtgt

SEQ ID NO: 276 - DNA, 317 bp, Homo sapiens
tacgggtcgtggcatattggccatggcaaattctgaacccatcacgaatggtacccagcttatcatctgcacttgccgaaactgattggttgtatggcaagcatgaggtgtttggcacagtgagagaaggcatgtatattctagaagcgaaggatctctaagaggtccaggaattgcgacaccagcgagaagatcaccattgctgactgtggaaaactcgaataggatttggcttgtgttttatccttaccaccagatcatccttcccgagctcaggagagcacccctacaccccatgggctcgcagtatcctagaa

SEQ ID NO: 277 - DNA, 408 bp, Homo sapiens
gggactgcagcgagacacagagattctaggatactgcgggcagatggggtggaggggtgctctcctgagctacagaaggaagtggtcaggtggttaagatagagcacaagtgcaccttattcgagttgtccacagtcagcagtggtgatcttcttgcaggtcttgccaagcctggacccaaggcgcgccatggcctccacaatattactgcctacttgcactttgcccgacgccgccagcttgccatccgaccacgcagtcttggcagtgcagatgaaagactgggaaccatttgtattggggccagcattggccaggggacagatgccggacccgtatgccttaggatggaggttctcagcttcagtttctccccgtggatgggcctgcccccgtgccatgtaggcg

SEQ ID NO: 278 - DNA, 530 bp, Homo sapiens
  misc_feature (1)...(530): n = A,T,C or G
ttagttttcatttcataatcacaaacttaactctgcaatccagctaggcacgcgaggcaacaaggaacacacggaacccacaggacactgcagcgagagacacagcatcctaggatactgcgcgcccatgggccgcaggcgctctctcctgagctanagacggaatgatctggtggttaagataccacacaagtcacacttattcgagttgtccacagctcgccatgctgatcttcttgccggctccgccattcctgcacccacagcgcctcatggcctccaccacattcatgcactctttcactttgccacacaccacatgcctgccatccaaccactccgtctcggcagtgcagatgccccactgggaaccacctgtgctgggctccgcatccgccatggaccacacgcncggcaccgctatgccttaggatgccagttctcctccttaaatttctccccatagacggacttgccaccagtgccctcctcgggtgtgcagtcccccacctggaaccatacaccctgga

SEQ ID NO: 279 - DNA, 406 bp, Homo sapiens
aaaaaaaaaacccacattcttttttattggtcagggttggtaggagcttgttacaaaagcgagtccatgggcctgtggaatgaaaggggagtggggcccttccaccagatcccaccaccgggccccgggcacttcaaagccctgtgggggactacatggcctgctcaaaccgtccctctaaaaaagatgtgcctgagccctactccttggtgatggaaaagggcttttgcacctgcctcttgccgcagtatgagaagaacacacacttaagggggtaatcccggatcgctgcctgggagctgtccaccttacgaacaaactccatgccctctataactttgccaaacaccacatgcttggcatctagccagcgaggatggactgccgcgatgaagaactgggggcc

SEQ ID NO: 280 - DNA, 466 bp, Homo sapiens
tggtcagggacgggaggagttagttacagcagtgagtccatgggcctggggaatgtgaggggagtgagtgcgctgcgccagatgccagcaccggggcccgtgcagcttagagccctgcggctgactacagggcctgcacatacggtcactcaaagaaagatgaccctgtgccctactccttggcaatggccaagggcttcttcacccagatcttgccgcagactgcgatgatcacattcttcatgggcttatcccggctgtctgtcttgctgctctgctgcttcctgaccagctacatgccctgtaaaactttgtcgaacaccacatgcttgccatctatcctggctgtcttgcttgtggtgatgaacaactgtgagccggggtgtgtatgactgtgatgtacatgctcacccagacaggcccgtactgctagagtttgaagatctgatcgaggaagcgctcaccg

SEQ ID NO: 281 - DNA, 523 bp, Homo sapiens
  misc_feature (1)...(523): n = A,T,C or G
nnnnnnnnnnnnnnnnnnnnnnnnnnnnnnnnnnnnnnnnnnnnnnnnnnnaaaaaaaaaaaacccccccttttttttttttgggcagggggggggggagtttgttacaaaagggagtccctgggcctggggaatgggaggggggggggtcccctcccccaaatgccaaccccggggccagggcattttaaaaccctgggggggactacagggcctgcacagacggtcactcaaagaaagaagtccctgggccctactccttggggaggggaaagggcttttccacctctatcttgccgcagactgcgatgatcacatccttcaggggtttatcccgggtgtttgttttggtgctctccaccttccgcaccaccttcatgccctctagaactttgccaaacaccacatgctggccatttagccaggctgggttgactgtcgtgagaaaaacttggagaccgttgtgtntttgtctgcgttggccatgctcaccagccaggccccgantgcttaattagaagtt

SEQ ID NO: 282 - DNA, 593 bp, Homo sapiens
  misc_feature (1)...(593): n = A,T,C or G
nnnnnnnnnnnnnnnnnnnnnnnnnnnnnnnnnnnnnnnnnnnnnnnnnnnnnnnnnnnnnnnnnnnaaaaaaaaaaaacccccccttttttttttttgggcagggggggggggggtttgttccaaaagggagcccctggccccggggaatggggggggggggggtcccctcccccaaatgccaaccccggggccagggcaattaaaaaccctgggggggactacagggcctgcccaaacgggcccttaaaaaaagatgtccctgtcccctactccttggggaggggaaagggcttttccacctcaattttgccccaanttgggaggaacacatccttaaggggtttatcccgggtggttgttttggggctttccaccttccgccccacctccatgccctttagaattttggcaaacaccacatgcttgccatttagccagggtggtttgactggcggatgaaaaactgggagccgttgggtttttgccttcgttggccatgccacccaaccaggccccgaggggctaagtttgagtntnatagggaaagcgcccaccggaatgcttttttctctgtgcatctccccgggtga

SEQ ID NO: 283 - DNA, 252 bp, Homo sapiens
cctcgcggccctcgattgtatcaagggcttaggcgacacgaaatcattctcatcctttgggaagtctgatcgtgtacttggaagtggacgtcaacgcgaatccgtctcggtgagtggtgctagagctgactgcagacgtcgtcgcatatacagctgacaactttatagctccgagcattcgtgataagggctttggctacaaaggtactacagattacagggtgattacttcctttaatgtgtcatggcggg

SEQ ID NO: 284 - DNA, 546 bp, Homo sapiens
tattaaaaaaaaaaaaaacccacatttttttttattggtcagtgttggtaggagtttgttacaaaagtgagtccatgggcctgtggaatgtgaggggagtggaaacgctccaccagatgccagcaccggggccagtgcagctcagagccctgtggcggactacagggcctgcacagacggtcactcaaagaaagatgtccctgtgccctactccttggcgaatggcaaaagggcttctccacctcgatcttgccgcagtctgcgattgatcacatccttccaggggtttatcccggctgtctgtcttggtgctctccaccttccgcaccaactccatgccctctagaactttgccaaacaacacatgctttgcaattagccaggctgtcttgactgtcgtgatggagaacctgggaccgttggtttcctttgcttccgttggcaatctcaccaaccaagcccctaattctctaatttgaatttcaatcgggaaggccaacgtaaaatgccttcctcccgtgccactcccccggtaaagttccgccc

SEQ ID NO: 285 - DNA, 178 bp, Homo sapiens
tcgacgtgctcgatggttttgtggcattgccattaagaatcaacctgcgtcaagagttgtctttgaattatatgctggtctgtgccccaagacatgggagaactttcgttgtctgtgtacaggtgaaaagggtaccgggagatcaactcggagaccattacattgtaagaggtgtctc

SEQ ID NO: 286 - DNA, 460 bp, Homo sapiens
  misc_feature (1)...(460): n = A,T,C or G
nnnnnnnnnnnnnnnnnnnnnnatattaaaaaaaaaaaaaaacccacatttttttttattggtcagtgttggtaggggtttgttacaaaagtgagtcccatgggcctgtggaatgtgaggggagtgggtccgctcccacaaatggcagcaccgggggcagttcagctcagaacccttttgggggctaaaaggccttgaaagaaggttactccaaaaaagatgtccctgtggcctaatcctttggggtgggaaaagggtttctcaactcggtttttgcggaagtttgaatggataaaatcttcagggggttaacccgggtggctggtttgggggtctccaccttccgcaccaccttcatggcctctagaaatttgccaaaaaccacatgcttgccatctagccaggctgtcttgaatgtcgtgataaagaatgggaggcgttgtgtctttgctgggttggc

SEQ ID NO: 287 - DNA, 451 bp, Homo sapiens
cccacatttctttcattggtcagtgttggtaggagtttgtcacaaaagtgagtccatgcgcctgtggaacgccaggggagtgggtccgctccaccacgatgcagcaccggggccagtccagcccacacccctctggcgcactacacggcctgcacacacggttactcaaagaaacacctccctgtgccctactccttggccacgccaacgcgcctactccactcgatcttgccgcagtctcggaccatcacatccttcaggggttcatcccggctgtccgccttggtgccctccaccttcggcaccaccctccacgccctctagaacttcgcgaaacaccacatcccttcccacctaccaaccctctcttcgactgtcgtcgccgaacaactcgcaaccgctcggcgcctttgcccgccgtccgccaccgtccacccagcaacgcctcgta

SEQ ID NO: 288 - DNA, 468 bp, Homo sapiens
ttaaaaaaaaaaaaaacccacatttttttttattggtcagtgttgggaggagtttgttacaaaaatgagtccatgggcctttggaatttgaggggagtgggtccgctccaccaaattccagcaccggggccagtgcagctcaaagacctgtggcggaataaaaggcctgcccagacggtcactcaaaaaaaaaagttcctgtgccctactccttttcggtggggaaaggaattttcccctcgatcttgtcgcaggctgcggtgataaaaaccctcagggggttattccggctgtctgtttttgtggttccaacttccgcaccacctccatgccctctagaaatttgccaaaaaccaaatgcttgtcatctagccaggcggtcttgactgtcgtgatgaagaacaaggagccgatggtgtcttttcttcgttggccatgctcaccaaacaggcccggagggtttagttt

SEQ ID NO: 289 - DNA, 142 bp, Homo sapiens
agaaacatcttttattggttttgtggcgagtactccacagtcaataactcgcacatctgcatgagggctagttgcacatcggtcttccagattttccatttggtccgataattcgaaaccagaaattagccggccaaagact

SEQ ID NO: 290 - DNA, 538 bp, Homo sapiens
  misc_feature (1)...(538): n = A,T,C or G
ctcaaaaacatcttttattgattttgtggcaagtactccacagtcaataactcgcacatctgcatatggtctgcttgcagcatcggtcttcagattttcaatttgttcgattacttcaaaaccagaaataaccagtccaaagactacatgcaccccatccaggtgtggagcaggctttgtggtactttggagcgcacggtgtaacactctttatgaaaaactgggaaccattggtatgtttccctcgatttgccattgataaaaggaacgctctgtcatgtttgagaataaagttttcatctgtttgaagaaaacacaaatttgtcagtctccaattataagtcactttaaagtaatgttcaagtaataaatagaaagcaaaagatgaaattcctcttctggtcagtacagataacttgactgaacactcagaaaagaaaaatttaagctaatcaaataacaaaagcataaaaaggccaaaagatactaattaaagccttgaggaaaagaacatatatttaatacttcacacanacag

SEQ ID NO: 291 - DNA, 287 bp, Homo sapiens
  misc_feature (1)...(287): n = A,T,C or G
gaaccctttgggggactaaagggcctgcacaggggggcactcaaagaaagatgtccctgggcccaactccttggggaggggaaagggcttccccacctcgatcttgccgcagtctgggatgaacacatccttacaggggttaaccggngggtgtgtcttgggggcctcaaacttccgggccaacaccatggccctctagaattgggcaaaaaccaacattttggcatttaagcaggggtttttgaatgtcgtgaagaaaaactgggaaacggtggggtttttgcctg

SEQ ID NO: 292 - DNA, 235 bp, Homo sapiens
cccaaaaaaaacccatggggcgatgaaactcataaaatgggggtgggccattcctcggaagaaaaagaatccgtgggagggaggggtgtttttattatagatgcgtttctcagatgaagatccatcttcgccgccacaatgtaaattcgtaccaccactattttatccgcatgtgtattcttcgccgggagggtgcctgtccatcttatatgaggagaaggactggaggcagccg

SEQ ID NO: 293 - DNA, 744 bp, Homo sapiens
tttttttttacaggtaaaacgggaaatcgagcaagattgttgtgtcaatgtcaacaccctggctgtgatgctttatcctagagttttgcaagatgttaccattgggtgaaatggggtaccaagtacacgaatctctctatattattgtttctttaactgcatgtgagtctgggattatcccaaaataaaagtgttaatttgtaaaaagtacacacagcatggcagttcccagcctcagagattctgatttaagggtctagccgggagcctgggcatgtgcttgaggcccccaggtgagtccagagtacagcggggctgagagtcgctgttgacattggctgcagggtggacagggcgagatgggccctgcccgggcagacctgtgtattgctaggtccttccggctctgatgctctgtgataattggccactttctctgccattttcctcccagagagcaaacacaggtctagactcaatatcgtgtggagctatcgatgaccacgggtcacttccatctccagcactgcaggctgtgcgggctggtccaactggggtacggttgagggtcctggctcagaccaggcctgactcctgggccagtctgtaaaacaggcccttctgggccagcagctgggccgggctgccgctctctgccacctgccccttgtccatgaccagaaccccggcacagtccatcacggagcgccagcggtgggcaatgagcagcacagtgcactgtgc

SEQ ID NO: 294 - DNA, 364 bp, Homo sapiens
gctcgacagatggaggagtgatggggagaaattctaagaaaacatgaagctcaagttttagtgagtcattaatgtgaatgtgttaaaaacattacctcggctcctttttccagaagtaactccacacagtcagcatctgacaccatacaggcacagtgcaagggcttcagtgtgccatgagtgcagttcacatctgctccctgtgggcagaagacaacttcagtcagtgtgttcagctctggcttgcccagcaggacagaattcagaactgagtccaggggacagagagttctaactctcactattttatagatacagtgctagttcctgtttccttttctagtaatattatgtcaatgtccaa

SEQ ID NO: 295 - DNA, 412 bp, Homo sapiens
ttttttttttttatttcaaattatttttattcagggattgcttaagcttccaaatagcaaaaactgacccttacatatgtcaatgttaaaacaagtggatttcaaatattttgaaaataacattggttgctctacattgtttttcacttcgatgtttgtcttgtgtgaaaacagtcttgctaccattgacatattctcattatagacagcatatggagagcagtgttgccatagacatcggtaatatttggatcagcaccaaggtctagcagaatagtttcacatcttcttggcacattatagcctgtcttcgttagaggtgtcttgttttcactgtcacagagaaattaaaataagtattccacaggtttcacaaactagttatatttcaatgagacaaattcatttttat

SEQ ID NO: 296 - DNA, 455 bp, Homo sapiens
aacactatatgggggttcgttcataatctgggaaagtttgtttgtatgattttaaaaaagagagaaatcagaagacaaagggcctgggaaggcaaggtaaagggaagtgggtccatgtaaggctgaagtcacgacgtgtaggggacccggacagcgcacccttcgtgagcctccagtttgatgcgttccatctcaggagggtagaactcctcacggggtggctgggtgctgagcacgaggtcacccttggcattcacggatggcggtgacacccaggtcggagacttgatgtccagccgagagcccagatcagaaaagttaggcactaccagaaaacgctcattctggtcccagtggcggatttaggaaaatagtcatgcacagtggagaacccttggaattccccatgtagtagggagaggtccttactccaatggtaagtcaaccgccgaaca

SEQ ID NO: 297 - DNA, 205 bp, Homo sapiens
gtagaggctccagtttcagacgttccagttcaagagggtaagctctcctctacggcctggcggggtgctgatcaggaggtcagtcttggaggcaaggcttgcgcttgcaaggcaggtcgaaggcctcgagtccagccgatgagccaacatccccaaagttaagcactaccagaaaacgctcattctggtctcagtgacggagata

SEQ ID NO: 298 - DNA, 397 bp, Homo sapiens
  misc_feature (1)...(397): n = A,T,C or G
gacactgggaccagaatgagcgttacctggtggtgctcaacttccgagattcgggccggtcagccaggctaggggctccaacctccctgctggcataagctgccagccaagcgctaaacttttgcttagtaccgacagttgcccggcaaagcgtngaggaggacacctccctgaagctggaaaacctgagcctgaatccttatgagggcttgctgttacaagttcccctttgtggcctgatccttcctatgcagaacctaccaccctcctttgttctccccaggccttttggattctaagtcttcctctccttgtttttaaacttttgcagattacatacgaattcttatactgggtgtttttgtcttcaaataaaaacatcacccctgcctcatga

SEQ ID NO: 299 - DNA, 508 bp, Homo sapiens
tttttagcttgataaatagaaataattttttttcgtttattttaccctggtgagcatatatgtattttatacaacaaagtatctcttcacttattggcaaggcgtgggtgagaatgacccaccctcacaacgactcatcacagatcacagtgcagcagtgtcgcgctcatacagactttaaaagcaacagttatcaatactcttctggcaaacaacccaggctccggaatggcaaaagcaaaagaagtttaggcaacaatcaaagcggccccgggggtaatcagtctgagtcttcgtcatcgaggtagtcctcggcgttgcttaacgttcgagccccatctgttccctgctgcttcttcttcaggagcgatgcacaggcagcgttggtggccatgtccaaggccagcttcttctcattggttctcaagtctgtcctcgcaccttgtgccagtagcaactggacaatgtctgcataacccttcgaggcagccgcgtgcagagctgtgtc

SEQ ID NO: 300 - DNA, 508 bp, Homo sapiens; identical to SEQ ID NO: 299

SEQ ID NO: 301 - DNA, 228 bp, Homo sapiens
  misc_feature (1)...(228): n = A,T,C or G
aacaacatccacatttcactccccccggggtttttgggggttttcctgcagccttttcccccccacggcccccataaattaagggttcttcctggaaacttctacagggcccgccacagggaggggatcaaagtaaaaaatcttccccacccctnatggccaccggaagagacgcccgattaaaaattgtggaaacccaccgggggcacccccatatatactggtctt

SEQ ID NO: 302 - DNA, 431 bp, Homo sapiens
agcggcaggcctggcagccgttgcgtctccgcttggtgatctcacactcgttggaggccggacagctgtactcgatgctccctgccaggaagaggcaggctccagtggcggcctcccgggctgggaggggacccagctgacaggagagccctgactctccccgggcaagcacaggtctggggggtatgggggaggaaagggagagcagggggccatgagcaggcagggaggggagtggctgctgggcggggtatcctgccctggatgagggaggagctggaccaggcagcggggctagtcctcagccaagcctcatctctggacacactgcctcatctgccgacatcaagggccacaaggactctgcattgctaaatccagtggtcattcttagtctcatgttacttggcctaaaggaggatctaggctgt

SEQ ID NO: 303 - DNA, 860 bp, Homo sapiens
  misc_feature (1)...(860): n = A,T,C or G
ggaatcaccaggggagacaggngcacagngagacagaggttcatggactgaggcaaaggctgggccaggctcagcaacccaggcctcccgcaggcaggcagaggctgccctgtaacccatggagaccagaccaacagctctgatgagctccacagtggctgcagctgcgcctgcagctggggctgcctccaggaaggagtctccaggcagatggggcctgggggaggatcccacaggcgtgagcccctcgctccagtgccgcgtgtgcggagacagcagcagcgggaagcactatggcatctatgccctgcaacggttgcagcggtttcttccaagaggagcngtacggnggaggctcaatccttacaagggtgcccagggtgggggcagggattgtgccccccngtggacaaggncccaacccgnaacccagtgcccaggcctgccggnttgagaagtgcttnaaaannnggnnggggnttgaacccaggacgcccgtnnaaaggaacganngccnagcccgngagganaagcccaggtnccacccctgganaagaatnnnnnnnnnnnnnnnnnnnnnnnnnnnnnnnnnnnnnnnnnnnnnnnnnnnnnnnnnnnnnnnnnnnnnnnnnnnnnnnnnnnnnnnnnnnnnnnnnnnnnnnnnnnnnnnnnnnnnnnnnnnnnnnnnnnnnnnnnnnnnnnnnnnnnnnnnnnnnnnnnnnnnnnnnnnnnnnnnnnnnnnnnnnnnnnnnnnnnnnnnnnnnnnnnnnnnnnnnnnnnnnnnnnnnnnnnnnnnnnnnnnnnnnnnnnnnnnnnnnnnnnnnnnnnnnnnnnnnnnnnnnnnnnnnnnnnnnnnnnnn

SEQ ID NO: 304 - DNA, 226 bp, Homo sapiens
cgacattgagccgaagacgagcagctacatgatcgaggccgactccctggcgtaacgtcacgacgacgagagtaactacattgacggacaaacgcctgtccgaagtcatgctcgtatgggcgacatgtgcttctacgtcgatatagagccttaccgaagtcagtaatgtattggaagtgaaggattctcagcagagtcactgtgtgtctacgcaccagtttcaggc

SEQ ID NO: 305 - DNA, 309 bp, Homo sapiens
tttgagagaaaaaacattttattgaaataatttagttaacgtgattaatatgaaggcatatattaataaaaataattaactagaaatacctatggtaaaaaattttaaaacttttttattgggtttttttcaatgtagcatcaacaaaatgcagtatatagttgcaggaatggtagtcactgtgaaatggacatgtacatgcgtagaaaatgtcaagagtgcagactgaaaaagtataaggcagtaggaatgttggcagaatgtaagtgccatgtgttttgcttttttctgaggcggattttgattttt

SEQ ID NO: 306 - DNA, 390 bp, Homo sapiens
  misc_feature (1)...(390): n = A,T,C or G
gccggaggaggggcggacccgcccgccctagccgaagcagagcacatgccgagccgagcggcccgggcgggggccgaccccggccagcagtcggctgcagagagcgggcaggaggcgcangccatgctgcggctggtgcccacttcctggactttcagggctncgtcattccccaagccatgcanaagctggtggtgacccggctgagccncaacttncgcgaggccgncaccctgagccgggactgccnggngccgctccccggggacggagacctcctcgnncggaaccgatttgttggtgttaacgcatctgacatcaactattcangcaggccgctatgaccnctcagntaagccttcctttgacataggtttcgaaggcattggg

SEQ ID NO: 307 - DNA, 5771 bp, Homo sapiens
  misc_feature (1)...(5771): n = A,T,C or G
tcctttacaaggggatagcatgatgctataagcctaggaaaaataaaattcaaagtttaaaatgaaaaaaatagagtaagacctactatttgatagcaaacagggtgactataagcaataataactgtacatttttaaataactgagtgtagctggattgtttgcaactcaatggataaatgcttgaggaggtagacaccccattctccatgatgtgcttatttatttcacattgcatgcctgtttcaacacatctcatgtaccccataaatatatacaccttctatatacccgtaagaattaaaaatagaaaaaaaatgnaaatgcccgtaagaattaaaacaagaacaaaaatgaaaacacactttaaagcgaccacaccaaccatattggtaatccagtttaaagtgaccacaccaactgtattgatgataaaccaaagtgaccacaccaaccgtactgataatccagcttaaagtgaccacggcaaccatactgatagtccagtttaaagtgaccacaccaatttttttgataatccagttttgtattttgacttctgaaatatgatcataaatgtttaattctgggccataactgggaaattagttactgaacatctaactttcaaccaaaaaagcccatgaagtttacatagataattcttgtgtttaaccaagtaataaaatatttaataaaatgaaagtatacagaagaaaattatgaattcatcaaatcaggccgttttgcatccagattgcattcagaaaacttgtttaacacctaggaaattactgtccaaagttgatagtgcttggtcttttttatcattgtttttattctgaaagctgtgcattactaatctacttttatgtaaatctgaaatacagtatttatcccatatgtccacatggtaaagtaatcaagaaagatattttcagtgcttagcacccccaccccaatttaaaggaaactctgactgtagtaaattcatgctaattgagaactctggggaaggggttaaaacattacccaggtacaagtcgggtggccattataaacgttacccaaataaaagccagaaacaggaagccaaaaaccaggtccctaaggcaggcatgtgtcttaaatgatatcatttgtcaagcttccagcatcttgtggtggtgaacacaaaaagaaggtctgcgttgtactgaggacattacatcctcattagctggaatgttcctcaagtacataatgcaggattttcattttaataagaagcagctacttgtcactgcactttcattagataaacacagaatgtaatactaatgaccatttacagaggctctatcctactccctgaggaacttcatccagatgaaatcatataatgacaagttatagaatatatcatgcaaaacttccttcatttctttgcaaactattccctgaatttttttttttttaatgctgaggtcagttaacagcagtagtcatcatcaaaggaacccctaaatgacactgctggtattttctgcctgcaaaacaggcttgaaggaatagcatttggctctttagaagtcataaccaaatggtaacagatcactgggactccttggtttctcaaagaggcaagctccttccaccctgcccggctggtgaccctaagcccgacatgcagagaagtccacgctgagaaataatttactcactgggattgttccaccctggccccttctctaaaaagactgacaattgccctgaattatggatgtactttttgtgatatgtattacagttcagaagaaaggtgttgagaccatcgtaccgtttcacctcccattagaggctggtcttgaacaataatcccagaagatgaaactgatgctgaactatgaccctcaatttacaaatcatttttcaaaagaataaaaaaaagtttaaacatatttttggcattatctgaatgggaggaatctttcatgcttgttttctaagaataagtgaaaacagcatgcagtgcactttcttagtttggggaaagagagaacatgaggttttcagattatattttattttaatcctgggcgtttgaattttatttttacatagctgcatttagtatattccctcaaaacacaataaatttctattctgtagcttaagggatccatcagttaaaatgttggtctttcatctttattaccctcccattaaaatgaaacaaaccgggactcacttcagtttcgaagaagcaatttagttggtaatgtccttactccccaagtctttacaaagggagaaagtacattactgcttagatttcacacatctatctgcataagaagcaactaagccttttggacatagactatgttaaatttaataatattctttgattagattattttattacaacattttttccattaccagtcatttcctgtgcacagttacattcataaaacctgctcccccctcctttgtttgtttgtgaatgtaaaagtgaggcaaagtctctttccgtgtggctgtggctgttaggtctgaaagggatggatgaataactaagcaccacactggacgggtttttcctagtcccctgcaccagtaaccctttgctataatgaggacacaaagagcctcgcatcaggccgctacccttcttcataactcaaaagcgtcacagtggcaatagcctctagtgctatttgtctttagtgcagttgtgacacttcggcatgatccataatttggcagctatttaccgtgacatttccccttcagtgcagccataacattcagtgaagccattatttggttccatttaccatataaaattgtattgttgtgcatgcatgctagcagctacattaggtacctgaaaatgagtaaatcttttaaaatagatacctaacagctattcagcaagtaggatttccttgctcctcagatggaaggaaagaaaaattaaatacagtccccatttttcctagagcatctttaattgcgtccatatttactgagcaggttagatacaccgaaacctaagactttgaaaaataatctggtgggcttcaccttcaatcagaacgggcccatggggtttcagcgcaacggtgacagcggcagcagtcttcagggcactaaaggttaagagggaagccgatgagccacaggcgtgactcagaagagagggtgcaggtttcgctgcttttcctgtgtggtcagtgggtcaatgtgggacatcaggctatagtgccaaggagcatctcattccaccagaacacgtggagagaaaaatgggaatgcagaatgagtggctgctattctgtttccagaatcagaggtaacgcatagcttctagttcgaacgcctctaaggagaagcaaatgtattcttccttgagatgactgaggtctctacggtgcacagggcgatgggacataccgtacctcgagcagtgtagcatgctgttactaaggccttgccgtgtgcctagacagcgcttccctcctggggcccgtgttttgtggtgaacccccactgagaatggagcgcacacttttctctttcctgtgcctatattaattttaagtccccctaatctctgtggtttccctttccaaaacctactttctgtctatgtaagttttcaacattaatttgctgcttcagaggaaagagaacatttccatttcacatgtgccttatcaggttgatggtagataaaagccattacgtgctacttcttcaaaacacatctgtgttcacggaatcatttttctaataacaaaatcaaatttgggagggaattcccccaaatgtccatttagatagttggttggtgatttaaaaaaaaaaaaaggaccatttcctcagtaaaaggggacgtaaaataaatgcctgaatataaacataattttaactattaaatagcataggagaaggaaaacaaaaaaaaaaaaagcaaagaagtcgggaaccaactttcaaaactgattttaaaatcctgatccaagctgaagacatacttactcgatcagatctggcatcaggaatgaatttagttccctggaacaataacatctggaacgagaccatccatgactaaagaattgaatgtaagcgttttccctcttagccatggagggaagttttattagcacatttttttttttcccccaagggaagaggaggaggaggaggagaaggagagacctattcattaacaccttacttttgttttaagaaatattatatccattaccaactaaaaataaattgatttgagtaattctgagacataaagtgcccattttctttctcccttgatttatgtcattgttctgtttttacagcttactgttgacagagtgaggtaattcaactacaatttttccagtgttttttcccatgtacatataattgacagcacggaatatggactccaggccagtaaacctgccctctggagacagatctccaaggtccacctcacaaaccaggtctccgcccacacacatctcgagcaagtggctcatggctgcttgatacttagaaaggtaatggttcaggaagaagccctgtacgctggcagatttcttgagcagtttggctggcaatgttcctgctttcacaggcgaaaggccagtaggagtttggtagccagagataaaccctattactatcaagcgccctttcgtagccagggcgtctacagccaagtcaaacatggctcccccaacagattcatagaccacatcgacaccttcagggtactcctgcttaaggacggtacctacgggttcagttttatagttgataggacgatcacagccaagagatttcagaaaagcagacttttcatcagaagagcaggttccaattacatggcactttgccttctttgaaagctgcatggcaaactggcccgttcccccagctgctgctgtcaccaaaacttttttcccttccgacagtcctccgagctctttcaggctgatgtatgcggtggtgccacttaccagcagggtaagatactcgggtttcactgagggcactggagttgcaatgctggcaggcacaactgtgtactcagcaaaagaaccaggtgccatgtaagccacagcttggccaactgtgtatctggcactagcagagaggcctagggccaccacctccccaatgccttcgaaacctatgtcaaagggaggcttaactgaggggtcatagcggcctgctgaatagttgatgtcagatgcgttaacaccaacaaatcggttccggacgaggaggtctccgtccccggggagcggcaccgggcagtcccggctcagggtgacggcctcgcggaagttggggctcagccgggtcaccaccagcttctgcatggcttggggaatggcggagccctgnaagtccaggaagtggcgggcgtacgacatgtccacgatggcccgggccccggtgggcaaccagcctaagcatggcctgcgcctccgcccagctctctgcnacagacgctggcctaggagtcggcccccgcccggnccgctcggctcggctgcgcactcctcgtctagggcggngggtccgcccctcctccggccggcgccctccncctggctccccccttcccngcgtngaccgctcccgctccccccgcctccccggcgccggcgcagcccccgcgaacccgggcgcaccaccccgggtgtcccggcctggggaccgctgccgccccggccgctgctcccggacgcgtggtcgactccgaa

SEQ ID NO: 308 - DNA, 295 bp, Homo sapiens
ctttgagctcttgcatgcggtcctgaactcccggaccactgggtagggcacaaactagccgccccttctgggtgaggaataggacacctggctgggagcactcgctgctagcccaaaattaactgttcatgagggagcacgggaggctttgcgagatgcatgaggtgcagccgctcgtaccaatgagagagctgttcagaactacgggatttgccaggggacgcggcggcatcattaactctgtctctgcattattggtgaactgcgcctgcgatccatggacagctacttgcat

SEQ ID NO: 309 - DNA, 205 bp, Homo sapiens
ttttggtggtgggggtcggaccgatggccctgccctggacaagtaccaaaacgatggcattcctggagcagtccttagaagtctggtaccacgctttcagctttctaaggggaatggcttccctgaagtacttccagcaacacttccggcccacattggtcccttcagctgcttgatgtgctgcaaagaaagcccccagaagaag

SEQ ID NO: 310 - DNA, 232 bp, Homo sapiens
gcacctggttgtccagcagcaaggccagtatcaaagtgaacttcttcttattcatgggtctagaggaagactgcaggatctggtccacggcactgacctattccttgatcaggtcctccgacaacgggttgatgtctatgggctacactggcaggccgtgcactagacccagatggatgcgtcagctcatgctgcccacgacctgagcgatgtgcctgacaatatcacgtag

SEQ ID NO: 311 - DNA, 154 bp, Homo sapiens
  misc_feature (1)...(154): n = A,T,C or G
agacgactgtgccgacttactattttgatggtgtcactgatccaagagacatgctcactgcctgcttggtgtgaacgcgcacatagatgacatcangctcctatggataccgacctcagatctgtgcactaggctgtttaagtctggtcacaac

SEQ ID NO: 312 - DNA, 295 bp, Homo sapiens
tatggaaaaatttagggttcccagtgggatgggggattattttttcagtaaagggtttcaggccaggagggacaattttccgggggttccccgcgtactggaatgttctaacaaaaggcagtccgggccgcatgggtccacccaagggaagggcattaggagtcatttttgtggggccacgtttttaagaaaaaaagaaacacactgcaagcgtgtggccgggggccggtgggactacacccaaccccttgggaggtgggcgcggcaactgcaaaagaggggggacccctattgg

SEQ ID NO: 313 - DNA, 239 bp, Homo sapiens
agtatcctacccgccacacgaaatgtatgtcaggctccttggtggggtggccccaccgttcaaataattataatcttggtccttgttggaggcggggggagggaggggagccaatgaacccgcgtcggacccgtcccctcatatgtagaaaacaaaaagggtgtgttagggggggcggttggggtgtgtttacccccttaggttctccaatataaaatattccgtttcatctggggtgg

SEQ ID NO: 314 - DNA, 403 bp, Homo sapiens
cgacctcgatgatcacaccaaacaccacaataatggccgcgcaggcgcccagagcaacaatcccaataatccatgcttgaaagcctacaccacacccggccaacataaccgctcgccagaatccacctgccagctcacgtggtaaacagatcagaaggccacccgacaccttcgggcacctacagtgcatgacgccgaacatgtcaccgcacgcctcgcccaccgcagaccagctgcacagtaccggcagggagtgaaagacaaacgacatcatgtgcctctgcaacatgaccaggctctagccacgcccgaaaatcgcgcagtccgtgacgtcagaggcaccacgcacatcgtacagacgcaagcacactgcagctgacctgtcgagccaatgcacgctcat

SEQ ID NO: 315 - DNA, 490 bp, Homo sapiens
  misc_feature (1)...(490): n = A,T,C or G
gaaatgtctagtactgaagacatctaagattttcaaagtctgagtgtatttttctgccagataccacaatagaacaaatgagagtaatctctgaccttgccgtgtgctgacttttaggaataccacattgtgaagaagtctacccgctccttaagcacgactcaggtggaatctccttggaggctcattcggccatccgtcatctcgatcattgggttgtacaaagaaaaaggcaagggccttggctttagtattgctggaggtcgagactgcattcgtggacagatggggatttttgtcaagaccatcttcccaaatggatcagctgcagaggacggaagacttaaagaaggggatgaaatctagatgtaaatggaatacaataaagggcttgacatttcaagaagccattcatacctttaancaaancggagtggattatttgtttacggtcgcncaaagttggtgagcccacctcacacctgtcgna

SEQ ID NO: 316 - DNA, 304 bp, Homo sapiens
ggccttggagaagggtacaatataaatattgcctggacaggtggccttgatcctcccatgggagatgttgagtaccttgaagcattcaggaccatcgtgaagcctgtggcaaagagtttgatccagacatggtcttagtatctgctggatttgatgcattggaaggccacacccctcctctaggagggtacaaagtgacggcaaaataaactcctgtgctggaggtacaacagtttggaagtatacttggggaaagagaaaacacaagatggaaggaagatctctcttttcacatcgggagcac

SEQ ID NO: 317 - DNA, 310 bp, Homo sapiens
  misc_feature (1)...(310): n = A,T,C or G
agaaactcagcatcattttttccataacatttcctgtatgtgacataaatncctaatatnactgctgcaaagacgagctggaaaacagtatagatgagtgggaaggtgaacaccaggttgagatcctcgggggagaaggagagctgtacaatggtggagcacagctgagtgttctgcattccagtttccaaggctactgttcggcacctgtaccagggttgaccagctagtctangccaggaagaaacccanggctggtaagccagctnataggggaatattgttcctataatccacagttttggggttc

SEQ ID NO: 318 - DNA, 374 bp, Homo sapiens
  misc_feature (1)...(374): n = A,T,C or G
gacagaactggtgcttctgtggacttggccatttgcacagcacaagcagtgatggataactcctctgtctgtcccccaaatgcaactgtctgcgaaggcgattcctgcgtagtacctgagagcaacttcaatgcaattctcaatacagtgatgagcactgtgctcaccatcctcttagccatggtgatgttttctatggggtgcaatgtggaagtccacaagttcctaggacatataaagagaccatggggtatcttcgtgggcttcctctgtcagtttggaatcatgcctctccacaaggcttttatcctgtctgtggcctctgnatccttcctgtacaggctgtagttggtgctaattatgggttgctgccc

SEQ ID NO: 319 - DNA, 380 bp, Homo sapiens
  misc_feature (1)...(380): n = A,T,C or G
nnnnnnnnnnnnnnnnnnnnnnnnnnnnnnnnnnnnnnnnnnnnnnnnnnnnnnnnnnnnnnnnnnnnnnnnnnnnaccctttgacttttttttaatgccccgggaggatctccttgcccaactcccagaaatgtttgcctttttcaatctgttccacttttaggaggcagccaccaggccttatccttccggccaaaaaaacaaaaaatatggggacataacagtcattcgtgcacatcccaaatttcaaagagcagcggtgggagctttttgtcctgcataacgcatggcaaacacctttctttgagtggacctctttcagggtccggaggcttaccattttaattaccatcctgggaaacattctccttgccatggg

SEQ ID NO: 320 - DNA, 287 bp, Homo sapiens
ggccgtgtgcgtgagacttgcatgcgcacccgaatgaatatcttgggtgggaagaaaacaaggatgtcctcccaggagtgcaaagcctgtttctgtagacaatcgtgttcgaggacttcttttctcaagaatgatgccaaaagggcgcccgtgcaatgagggcaaatactctccgttaggttttaccctagattgcggttctggtgagtagtcgtagcagatgtagaatttcttgtccggtaaaggtttttaggaggaggagggacagtaccttcaggatgacttta

SEQ ID NO: 321 - DNA, 352 bp, Homo sapiens
gggtgacagcatatcacttagccggtaccttgacaggctgttctccacagtccgaacaggccaggaagacacgggtagggacagagctcaggctgagaagaacagccggcgttctgtcagggttgtcagaacggatgggcacacaggatgggcccgcggctgtcgtctgttggtccggcacctctagcagcggcatatagcaaagttgtgaatgggtgtgtcaccgatgaggttgaagtagaagagatgttccaggtatttgagtaccgtggatcgcaatgcgtccagtctgcaaggagcttagcgaaccttcacaggttgtactgagtacttatgctttgagtgggcctcc

SEQ ID NO: 322 - DNA, 148 bp, Homo sapiens
agtttttaatctcccgaaatttttttacacaagggtcacagggggccaatttggtcaaggggttttatatgtgtaacaaatatccggggggccaaaatttgcaaaactttttaaaaagtgtccctttgtggcggttttgccccccaag

SEQ ID NO: 323 - DNA, 257 bp, Homo sapiens
  misc_feature (1)...(257): n = A,T,C or G
ccatatatggcgagtttaaactgtctggggagagtaacacaacacaggggagggtttcaacgggggctttacctcacaaacggttgcaaaacaatttctctatagctgttgaggccgaggagctgtgggatcgcaggcgacgaaaatccctccgaatctcggagatggttggggcagtggcacctcacggtttcttccaaagcagagagagcggtntcctgcgagctttccacgagggcgtcagcagagagagcaca

SEQ ID NO: 324 - DNA, 492 bp, Homo sapiens
  misc_feature (1)...(492): n = A,T,C or G
ctgaagcaagaggaagccttccgcagctactttgagatcttcaatggtcctggtgaggtggatgcacagagcctgaagaatatcctgctcctaatgggcttctctgtgacgctggcccaggtggaggacgccctgatgagtgctgatgtcaatggagatggtcgtgtggacttcaaagacttcttngctgtgatgacagacaccaggcgcttnttctgctctgtggaacagaacgccctgtcggacatngctccccacaacccccacactcttactctttgagatcctgtcccttnctggtcagagatgctggccttaaccagaggcagtctttagaggaantcacaaattatnaccagaaaaaagtntaaggnaaggcaccttncaaggncccaggganattggaaagcggccttngtttgncgggtttgncagaagtttnccttacaancccccagnaagaaggagagtttcagaantttccaggancga

SEQ ID NO: 325 - DNA, 475 bp, Homo sapiens
aatttataatatagcacttattttggatcggattaccgctgaagaaaacttggtttctccattacatagatttgtctttgaacaatttgaggctgagtgcattaagcattgctctagagtattggcgagaagccatcttccaatcgatgccacttttcatcattgcttgaaactcttcaaagcagattcgaccgtccttatccaagtcagcatcaaatatgatatcttggatcacctgctcattgttgggaccaaggttctcatctagcaaggcttctctcaactcttcaaattcaatatacccgcttttgtccttgtcgaagtaaccaaaagcttgagtgagatgctcctcactgctaatccttttcatgtgaatggacatcgtgacaaactcctcacagtttagagtgccgcttccatcaacatccgcagcatccattaacaatttaacatcaggatcaggaactgggtgacc

SEQ ID NO: 326 - DNA, 187 bp, Homo sapiens
ggccatatatgttcaccagacccaaacaagtcgcaaaaacttggttgaaataccacccatccatccacagtgtaattgtgaatattggattaaactccacacaggtttgttgtgcccgaaatactctctaagactgtgcggacccaaagactgctggggggtaactgtgcatgtcaagtctgccttt

SEQ ID NO: 327 - DNA, 399 bp, Homo sapiens
  misc_feature (1)...(399): n = A,T,C or G
nnnnnnnnnnnnnnnnnnnnnnnnnnnnnnnnnnnnnnnnnnnnaggaagagggcggggcccgggaagttttttttttttttaaaaaaaaaatggccccggaaaaaaaggggaggcctttaaaaggaaggagagtttttaaacccccataattttttaaaggggggatttggggcccctgcccaagccccttttaacccaaccaaaatggtggaaaggaaaacacacacgttgggccccccaagcccaggagggggaaggaccccaagggttctttaatacccttggtggggtttccccgggaaaaaccctaagcataaaaaactcgtccaacaatccaggccaagcccaggccaaaaggcttcccggggggggaaaccctcccccagttgaaaaaaaa

SEQ ID NO: 328 - DNA, 115 bp, Homo sapiens
accccagggctcctcgactacgctagctgggttctcccgtgtaatagccataagcataaagaactcgtccaacaatgcatgccaagtccaggccacaatctattcgccggtggta

SEQ ID NO: 329 - DNA, 372 bp, Homo sapiens
  misc_feature (1)...(372): n = A,T,C or G
tcagggcaaaagagggcaaagagagcccacggttcctcgataccgcttgctagggtctcctgtgtaagtagccatatgcgtaaaggactcgcccaataatccaggccaggcccaggccaggaagctattgcgccgggttggacacctcccaccgttaggaaaaacaggaagggagggtacacctccaacgtgttctggtgggcgcgctgaatgcagttgaacatatgcccgttctcaggatctgtgctgtacatgacagggtactctaccttgtacttctntgcgctttgcccacgttgatggctaggtggagcaccatcacaaagctggcagcaccagtgagaagcacaaatccatactccttagagagga

SEQ ID NO: 330 - DNA, 297 bp, Homo sapiens
atggttgactgaattaatcacatgcgctttgaatcccattgcaacaattaatcctttcaaaagatgatgccttatgagtactgcaactgcattccaaagattgccaagaaaggtttttgccaatccagaagacctgttagccattggcaaagggaaaaaatgcaagggagttcctcggacaaggttccagagtaaaccttttccccagagcccaacttgaatgacttggaaaatattatcccatttgttggaaattggctccggaaattcctggggtggtccggacccttctaaagc

SEQ ID NO: 331 - DNA, 386 bp, Homo sapiens
aaagacttaagacgtaccaagttaaatttcttatccccatgtatcacaagagagactggatatggggcctgcatatatgcaaaatggagattgacccaggtcaaaattcctctgcccccctcctaccttgagtgctacgaaagtaatcattataaattgggagtagagtattcgtagaaagccgactggatgacgtgttgtatgagtttctccgcaggtagaatttagcttttcgcaccctgtatgccggggaaagagtgactccaggtccatcatggaaactgccagtctccatttggctggggtaggggggtcacatatgcaatggtgtggtgaatccgtagctccgactatagatcgaagtgtcggaaggctgtagacgggtc

SEQ ID NO: 332 - DNA, 241 bp, Homo sapiens
  misc_feature (1)...(241): n = A,T,C or G
caaccccaatatcagaagagagttagggaatgagaagtagaggggagatggtggtagaaatcgtctatatgtagttatcaaagtcacatccgaaaaagaagatgaggtaatagttagatatgccagaagcggacaagnggaacagaaggagatagtagcgtttaccaaatatgtagccaggggtgatatgagtactctctcctaggtaacgacaaagtactttagcctcacaaacangtac

SEQ ID NO: 333 - DNA, 313 bp, Homo sapiens
ggcagccattgggtccaccgccccagcccccttttaccccacccagatgctgggaagcagagcccacagttttgccccccacgccccagagggggttggaccccagggcccccccactaccctttctggggtttcccgttttataaccataagcataaagaactcgtccaaccaatcagggccaggcccagcccagagctttaccgcgggtgttaacaccccccccccctctgaaaaataagaaggggggggtaactttccacgtgttcttgttgggtcgctggatggaggtgaaaatgtggccccttttagg

SEQ ID NO: 334 - DNA, 166 bp, Homo sapiens
ttggtccactgagcaaggcacttttaatccaaccgtgatgcttggaagcatagcacaccgttgtcggcatcaaggccaggagcggaatggaccccagggttcctcgtctaaggtttctgggttcacgcatgtgataggctttagcattaagaacttgtccaacaat

SEQ ID NO: 335 - DNA, 142 bp, Homo sapiens
ggctagatttgcgcgcactgtccaagccacttttaaccttgcccagatgctggaaagcacagcgcacaagagagcccatcaagctcagaagggctaatgacccgagagctgctctactacccttgctgcgatcttctgtgta

SEQ ID NO: 336 - DNA, 621 bp, Homo sapiens
ttttttttttttctggacatcttccattttatagaaagggaaattgaggccaggggttggggaggcctggcaaggaacatggtgcatggtaggtggcagaagggacctctgtgctcagagctgtgcctcaggacccatcgttcagatgggaagactgaggttggggaggtgtgtcttgggttaggaagctgggctcggggcaggggtcagcgcgggcatggcaggcacggtgaatgtgaacttctcagtctggacaaaggcaacgcccttctcatagtaggcagcctcgttaatgaacacggggtacaccgtggactctccctcatagagcaggtcctccccactgaacatctggaagatgggagcaccaggctgcagtggctggaagtctcggtcctgcagctgaggatgcacagtgcctgccaggtgcccggcctcggtgcgggggaagtccacgacgcccccgggtctataggcttccatctcaaaggcaggaaaagccgtaccctggttgaagagttcgatgaagtccagaactgtggccaccaaggtcctcatccttgagaaaatgtcagcccgcagcacaccctgtggctgggggcccagcaccagacgcaaggg

SEQ ID NO: 337 - DNA, 208 bp, Homo sapiens
cgagttcgccaaaaaactctccccaagcagctttggggaaaatcccgggggtttccaaacgatcagcggcagaaataagcccacgccctcacaaggggatatggaaacccgcttggcaaaaaaccccgggggggcaatagaactggggcccaaaaaaaccccaccgggttccaaagagaaccccggggccaatgtgaaaaaatctggg

SEQ ID NO: 338 - DNA, 255 bp, Homo sapiens
ccagtggccagcagatcatccacgacgacacacactcatgtcctggctccagggcgactatctgaatctccagctcagcattcccgtactcaaggggatagggggcccacagagatgacttgggcagattcccccgctttcggatgagcacgcacccagtacaagctcctgggccagtgaaggggcaaagaaggaacctcgaaaatctagagctgcaatattgacaatgagggccacgttggtagcccttaaggt

SEQ ID NO: 339 - DNA, 180 bp, Homo sapiens
gcttagccttcccgtactccacggaataagaggcccccaaagtggtggtcggcagcttccccccctttcgggtgaggacgcagcccagtctaaactccttggggagggaggggggaaaaaagaagcctccggagtctatgcccgcgatgtattcgatgcggcccccctggtggccttcag

SEQ ID NO: 340 - DNA, 214 bp, Homo sapiens
tccatggcccaggagcttggactctgctgcgtgctcatcagagaacggcagaagctgccaggccccactccagatcgcctccaattccctggagtaccggaacgctgagctggagattcagaaatacgcccttgacccaggaacaagggtagtccgtgtggaagtatctggttgccattggtggaaacatggaccctgactatgaacctgtggg

SEQ ID NO: 341 - DNA, 461 bp, Homo sapiens
tctcccggggtgtgtggttgggttcagtgtggctgaaacacagctttgcccggggctttgggggcttccggccccaggagaggcgcttaaccccagcaaaggaatttgttccctgtggggggccggtgggcctggtcactgcggttgggcgagggctggtatttccctgggagtgggctgggggtgttgggctggggggccgtgtggtcactcatagtgcaggagaggggaggagggtacgaggtgcaacttctccctggccttgagcggagtcggctccggcaggctcgcggactccagggactcagcctgcgaggggcgcaggaggtcggagggagggttcaatgttcaggagttggcagcaggttatccagggggcgaacctctgtcctgggtgcgggggtcttctggaatctcagctgaggttcccgtactcagggaataggagcccagagattggg

SEQ ID NO: 342 - DNA, 522 bp, Homo sapiens
ttgtgggaaagctgtttactgcgttctcccgctgtgtgtaattgggttcagtgtggctgaaacacagctttgccccaggctttggcacttcccccccccccagaaaagatgaaccccagccacggaatgtgttccctgctggcagccggtgcacctggtcactgcagttgcccaaggctgatatctccctgggatgcagctggagatgttgggctgggaggccctgtggtcactcatactgcaggagagaggaggaggggtcagttgcaagcttttcctggcccttaaccaggttaagttccacaaggttaaggaattccaggacttaagcttgaaggggcccaagaagttaaaaggaagcgttcaaggttccacaattggcaagagtttaatccaggaggaacaacctttggtcttgggatgaattcgatggggccccttgggttggcttaaggtgttcgcgcaagggggccaatggggacccggaaggaggcggggtccttaggaagggccaaattgtcc

SEQ ID NO: 343 - DNA, 507 bp, Homo sapiens
ccagtgaaactcattttattttcagctgaaaaatatacacagataagcattaaaattgaattattataggttttctgaaaataaaattttacaatacttatgtttaacaaagattaaaaaattcaaacaaatcaggaaggcacaggtcttgtaaaatgtaataaagaatttagtccataccttgatgcatagtggtggcattaaatggcacaatttttcggtatcatgcctgcctgccttagatctcaaacagacctactctcttttccttctttctcatcttaacaaacttttgataatcaagcatcatagtatgacaaagagagtaacaagagctgtgcaggccagcacatccagagagcagtactgaaaccaggtgagcttgtgggcaggtggcagcaggtacttgggctccattgtggtgcatgacaaattcaatccagaagagtttttggttccagggcttcagagactgatcataataaatgcatgataactacataacat

SEQ ID NO: 344 - DNA, 588 bp, Homo sapiens
ggcaaagagctctactcattcttaattttcttttctttctttaccaaagaatcggtaaatgaacaagaggcactttacagtaagaactatagtgactgcaacaccaagagagtaggaagccgatcacatctaggaaagtggtactggtgccaggtaaggttatgtcccaagtgatctcaggtgcttagcccttttgtggcgcatgacaaactcaaccccagaagacaagccctgtccaggggcttcggtaaggctggtcgtggtgaatgggttgacaaccatatagcattcctttttatagaaaggattgtctatgacttcctccagtgcattgagtacatctgatcttgacattgttctgatattcaatgtaacagctgctcctttggccaccatatgggcaatattatcatgttgttctccaaacaaaggaatgccaatcatagggattccatgatagatcacctcatagacaccattggccccaccatgagttacaaaggcttttgtttttggatgaccaaggaggtcattctgggggagccacttgtacactctcgtattgtgtcctaaagttgctggggtttt

SEQ ID NO: 345 - DNA, 329 bp, Homo sapiens
ggaattccacccatcacaacttcattcaggaaccataaaacagtcctgcgtgggcctgtacgcccaaaccccgactgactggtgtgtctgataggcgacacagatattaattaagtagctgccgcaaaacctttccgcctggcacccgtgtgacccgtgcctttatcacccatgctgcttcccatggagtttatggaagcatgtgcaatgtccttaccatgatgatgatgcccttgctttttgatcaaatgggcgatgtgaatcgcatgaaaactaagcgagctgaagtggctctaaatgatttgaagatggctttggggctttggatc

SEQ ID NO: 346 - DNA, 495 bp, Homo sapiens
  misc_feature (1)...(495): n = A,T,C or G
nnnnnnnnnnnnnnnnnnnnnnnnnnnnnnnaaagcacatgtattagatttttaatcctttccaagaatgtcattttatcacttaattcagacagaacagcaggtatgcgggaaatggggaatggaagtcctccactatacttctcaagtgtgtagccaggagactgtcaacaaaggacatgtatttaacatgcctttaacatgctcagctagcagttcaccacaggcaccaagggcacctgcaagaacgacatcaaactttgactcttgtagttttgtcgtaattttcttgttcaaaactacatctttacagagattattaacacagtctgtagattcccaaaagagttcttgtgcttgtgaaaaatatgaccaaaatgcatcttttggaagatcgtatatccatctattgatcagtttcacaacaagaccctcaaaattatttttaattagagatgttggataaacttcaaatttaatagcagatgatttact

SEQ ID NO: 347 - DNA, 469 bp, Homo sapiens
tttttttttttttttttgtgacactcacaatggtttattgtcttcaagcattagaaaatacatacatgtactcagcattgtgttcatgttcagagtcactgctgctccctcggtcttcatgtaagaactcatcaatccatgctatgtagtttaaaaaaaccctgtacattcatgaaggatctttaatgactgcttttaatgcattgagcaaatctgtagttgacattgtttttgtgtccagtctgatagcttctcccctagccttcatgtgaacagtgttatcaggttgatctgcaaacaaaggaagccccctccacatagggatcccatggtagatcctctcataggtgccgttggtccaccatgagttatgaaagctttggtttttggatgatcaaggatttgatgaatatttgaataattactcattataagtcttagaaataaaacgagcaatgcacaatatgag

SEQ ID NO: 348 - DNA, 470 bp, Homo sapiens
  misc_feature (1)...(470): n = A,T,C or G
ccttgggctccatggtgaacacctgtcagaatccggaaatcttcaaggagatgagcaatgcctttgctcacctaccccaaggggtgatatggaagtgtcagtgttctcattggcccaaagatgtccacctggctgcaaatgtgaaaattgtggactggcttcctcagagtgacctcctggctcacccaagcatccgtctgtttgtcacccacggcgggcagaatagcataatggaggccatccagcatggtgtgcccatggtggggatccctctctttggagaccagcctgaaaacatggtccgagtagaagccaaaaagttttggtgtttctattcagttaaagaagctcaaggcagagacattggctctttaagatgaaacaaatcatgggaaggacaagagatacaagtccgcgggcagtggcttgccagtgttcntcctgcgttcccacccgttcaggccccacat

SEQ ID NO: 349 - DNA, 457 bp, Homo sapiens
ttttttttttttcctcagaggggggagggcatgtttttcaaaaacaaaaagtaggcaaaaacagtccaccaccccatctttcctgcccaggcccctggctgggggaggccaaggagtggcttaagttgtccagcttctgggccctcctccctcccatcaagacctggaaggaggggctgagccaggggccggccccaaaggcccaggccagggccggggccaggtcagcacctccgccctccccaatgagagtcagcactggagccttgggtcttgcagttgtttccagagccgaatgctggcctgggggcccaggggccgtaccagcagcaggttgcggaaagcacagaggtccgcagtgcggtctgctggccaggctgtgaggaagccttggtggcctggggcaccaggcccagggctcggatgcaaaggccagtgtaacgtcctcaaaggggga

SEQ ID NO: 350 - DNA, 419 bp, Homo sapiens
ttttcgaagaagtggagacaagtttattgaggagcttgacacccctcttctgccctagcttgagagaacaactgcagcattttgttctttttctcttcccgatgaccatcttttgggctggcgggcaggccctgggtgtctcccatatcgctgtctttagtgagactgaggatctggtataaggaaacagatcagctgcagccagtgagggcccctgcgttgggcctgggagagagaaggtcctgttcctgcctttcctgtggccccaggcactctcagctctgaagccaggctattgctcgacaccgcaggatgcccaggaatttcccatagcagcaccggtctagcgggtagtgggtggcaccagccagcttgacacactgtgttggggcgaggctcctcgtcgggcacttaccccc

SEQ ID NO: 351 - DNA, 373 bp, Homo sapiens
  misc_feature (1)...(373): n = A,T,C or G
tatagngctcggcgtggttgcagatggcaaattcactacagcccgccatttttagttaagcagacattgatgagtgtgcagacctttccatctccagtgtatgctggcaaacagttacaggcagcctggttgggtcctgtctgtgtgcactccgcattcttgtcacagccaccatggttctccaaacacgggttgatttccagggcacacaatgccatcacccgtgtagcctgctttgcacgtgcacactcgccttcctgggggtgggttctcttacagtcagccttggcaggagcaacctccattgctgatctcaaaggaattgattgctgttcagaatgggncccgtttccttgggaatccngttgaaaaa

SEQ ID NO: 352 - DNA, 294 bp, Homo sapiens
gtgagctctacgggcaggaggggcgcccggctctgcatgcacgcctgcgtaacaccccgggctcttaccgttgcacctgccccggtggataccgaactctggctgacgggaagagctgtgaggatgtggatgaatgtgtgggcctgcagcaggtgtgcccccagggaccacatgcatcaacaccggtggaagcttccagtgtgtcagccctgagtgccccgagcgagcggcaatgtgagctacgtgaagacgtctccattccagtgtgagcgaacccctgccccatggacagca

SEQ ID NO: 353 - DNA, 334 bp, Homo sapiens
atcattaatatatttttatttatcagcaaaatggcagctcacatattttggaaaaatagccatggaaagtagtttgagataagaatatttttaatttgggagtgatagaggtgtcttcgattgtgtatttatgtcagactgttttcctaccttgattacaggtttttccagcataaccaggatgacacttgcacttgtttggcccgatacattcaccatgtttgcatcgtggttggcacacagctttgagctggcaccttatcctggctattcgctgccttaagacgtagaaagctgcaaaacaaatgtccaaaaaaagaaattccagatcttt

SEQ ID NO: 354 - DNA, 500 bp, Homo sapiens
gcaagacctcgagccatcccgctccaggacgcatttgctttctcatggcacgggctgggtgaccatcgggcagaagtgctgccacgccgctgcagcctgacgtctggtcgcccacgaaaccgggctggcaggggccgcactggaaggagccccgggtgttgacgcacacggagttgcggaacgcaattgtgctgcccggtctcacactcattaatatccgtgcaaacttgtttgttggacttagcgaaggtcagtcccacgccctcgtgggtgaggtccgctgaagcccaaggggacaggcttcgcagtgaaagccagggctggtattgatgcaccgcacccgcggacaacaggggtgagcattgcactcattaacgtcggtgcagtgcgagccgttgcccgttgtagcgaggagggcaggggccgcagcggcgccgtgagactgtctccgagcagactacgcaggggaagcaggagccgggtgcgcagagcgcacttgg

SEQ ID NO: 355 - DNA, 543 bp, Homo sapiens
ttcaattttaaatcataaattttaatttttgaagtggtatgcctctatttaacaaaacacacacaaacacacacacaaaatcatcagattcgcagagctattgtctctgacttctccactggctagggcatttgccttgagacatttatgtttgtggctttggctgtgcttctcagaatcaggactgttttttaggtatctgagcatatgccaacagtctgaaacatctgtgtaaacagatttgagaaacagtgaaaaccccataccaaacataaacagagtgggcttacctgacgtgcctggctggcagttgcactggtagccattgaccaggtcaatgcagcgaccatcgttcaggcaagggctgctgtaacattcatcaatctggtcactgcagatggcgcccatgtacccgggattgcagatgcaggtgtaggaatcaataccatcctgacactgaccatggtggcaaggatcggggtcacagttgtcaatgttctcctcacacaacacaccagtgaaacctttggaaagaattttatc

SEQ ID NO: 356 - DNA, 472 bp, Homo sapiens
aggaagagcactcaatcaagttgtggcaggcactggagaactggtcggaggagaaccccgagggcaggggggcttttaactccccagggtgttgtagcaggaagagtaccacacggtatggggttggggggttgattatcatcggcagaacgattccactggtagtgctggaagtagccttggggggaggcacatctgtagacacccacaattttttggcagccgtgttgggacctttggttgccaacacaatcatcaacatcttcacagttaagtccgggggcatcaagagagaacgctcttttgcactcacagcagaaagtgcctggagtattttgagagattccctttgctccacaaagcaaaggttgagagccacattcgttgttgtcgatacaagcagtgtgatgctgtgtgaaacaggtgggcatttacaggtaaacacccccaggctgttgacacatcaggactg

SEQ ID NO: 357 - DNA, 374 bp, Homo sapiens
  misc_feature (1)...(374): n = A,T,C or G
ttttttttttggaagttgatttttaatgataaagtacaatcgaagggagggcagaggggctaagaagacacaaagtccattccaaaaatgcaggaagatgtgtatacaatgctgggaatcccaggatcccccaaaagacaataaggagaaacacaaccaagcccgtaagaaaggtttctttatcaacacactcatcaggaaagctaaagttatctgagaaaagagaaagacttcagctggtatataattctgtgagaacagtagcncaaaaaaggnattttatattataaaagtatattttatatttttccacccctagacaccgtttcatgcaaatactaccaaagggaaccaaagaggtgagaccngaatta

SEQ ID NO: 358 - DNA, 376 bp, Homo sapiens
cgtatattctaaggctagtcaacgtgatgaatgttaatcagcaccgtttggcctaattcttggttgaatccgcttaaaggtcatccatgacttcgtgcgccgtcaccggatctaacgctgccacgggttcatcagccaagaggacgcttgggttttgcgttaatgtccgcgctaatgacacccgcttgttgttgaccaccagacaattgatcagtccgcacgaatgctttatctaacattgacattcgatctagtgcctctaagggcgaatcttttctgttttggaaatccccaacaacagggccaaatggatatccgaaccacgactcatcacattttgcggactcgatcgtgcagagatatcgatggaaatcat

SEQ ID NO: 359 - DNA, 275 bp, Homo sapiens
cgcacctgcgatagctcaacaaccagatgaaatggcactcgatcaatacacggaactgccacattcaagagcgtcacaaaagaattaaacaggagacatgaatggagaactggtctccgtggtcatcgtgttctgagacatgtgatcatgatgtgatcacaaagatccggctctgaaactctcccagagcccagaatgcacgggaaaccctgctgaacgcgaacgcggagagaagaaagcctgcaagagagacgcctgtgccatcaatgcaggct

SEQ ID NO: 360 - DNA, 597 bp, Homo sapiens
  misc_feature (1)...(597): n = A,T,C or G
nnnnnnnnnnnnnnnnnnnnnnnnnnnnnnnnnnnnnnnnnnnnnnnnnnnnnnaggaaggggggggaaaaacagttctgggggagggagcccaatttgggggccgccctttgcggaaaaaggctctgctcttggagtaggggaccgaaaaaccccttcccccctaaaaaaaaacagggacagctcaaaactgggggggcccccagggggcccgcggttcccgtgcantggcaatgcaaagggcactctcccataacccaacattcctggcttgatgggggctcgaaaccgggaccccctggccgctcgaaactcctggggctcctctctccctaagggggaaacgggaccccgaaaggggccaccccttccccgaaactgggtcctgtacaaagggagggtttctggagaaatctggggtctgggaccctggccccgggggaggaaggcttctggatgtcttgggggcccgggagggaggggcaaactccggtggagctccactgtaaggagctgacatgttcggctcctgcgctgcacccccaccccgcagggcttggagcaagaggcccacttgacccaagggccccaaacacc

SEQ ID NO: 361 - DNA, 338 bp, Homo sapiens
  misc_feature (1)...(338): n = A,T,C or G
aaagatttggacagggtggtgggtggagcagtgngtcggcgtggtcgtcttgttctgtgacgggtggtgatggtgtggtggcaagggtccggctctgcaggtgtgccagccgccaggtgaatgggaaaccctgtgagatcgacacnngggggaccaaagcctgcaagaaggacgcctgccgcatgagtggagggctgggggtgcttggtgagcgatggnaggatctgttcgtgtcagctggtngaggagggggtgcagaaacgtagtcggctctgcagcaaccccgcaccccagtgttggggcaaggactgcgttggtggtgtagcagaggaccagat

SEQ ID NO: 362 - DNA, 434 bp, Homo sapiens
  misc_feature (1)...(434): n = A,T,C or G
cctacatttgtttcacataagccatacagataaagagacttttgttaaaattaaacttagtcctgataaatgtcttttcttgttttattaggtgtatggctgctgctttaaaagatgcaggtgtgcagcctgaggagatatcctatatcaatgcacatgctacttccacaccattgggagatgctgctgaaaacaaagctatcaaacatctcttcaaagaccatgcatatgcccttgcagtttcctcaactaagggagcaacaggacatctgctgggagctgcaggggcagtcgaggcagcttttaccacattagcntgttattatcnanaactacnacctactttnancctggattgttcggaaccagaatttgatctcaacttntgttccactaaaggcacaggaatggaaaactgagaaaagattttattg

SEQ ID NO: 363 - DNA, 304 bp, Homo sapiens
gctcgaccccaggggcggcgctgtgcaatcagggcctgcgctacgggttcgaccagaaaggcgaccgcacattcgcctggcacaatgccgtcagcgtcctggccgaacgcctgcatccgggcccgggaggaaaaggcggtcaactgcgagaaccccaggaacagcgccggtggagcacggtgttcaatgccatgacaatcgcgttatccgcctgtccactgttgatcagggcttgagcatatcgattgcataggggaacgaactgcaggcggtatcgaccgatagcgccgggccgccgtcgacg

SEQ ID NO: 364 - DNA, 511 bp, Homo sapiens
tttcgtaaattttcagtagaaaaagaactgatcttatatttggtcacacactgcgtatgtacaaatatacatggaaaaatgacttggatagctctgcctaggaaaagtgcatattttaatctacaggagacattgtgtgtctccaggcacaacacatagtgttgtatgacatattattttagggccagttcaatgtcctcccagtgatctggtaaaatttttgattaaaaggatgaaagaatttgcgcaatttagtaatgacagaggggtccacctctggatgaatgcgccccttgctgcccgccaggcacttattaaagataatattaaaccgcaagcagtaaaaccctctggtagcattgaagtataaattgtattgacttatccttggaggcagatttaggaacttctccacgagctgaagttctggcagaggttccgtgatgaggcgatctccatcgacgacatgaaattgctcaattggaaagtatttcaaccacctttccagatg

SEQ ID NO: 365 - DNA, 1053 bp, Homo sapiens
attctgggtccaagctttatttcttaaatattcctctctgcccagcatgtgcacgcagcccgctctggccaggcgagcgggtgtcaatcaaggtgctgagcatccccagggtgccgctcagccccagccgaagtcctggcccgtcatctggtagaacctgcggttgaagggccggtagaactcctgcaggcgccggaccacggcctggggcacgcgtgggtgtggccggcccttggacttgcccaggcagcggggacggctgccgccctgggccttcttgaggcaggggaagcccttggtggcgttgaagtagaagtgcttgtccgtgacgacccgtttcaggcccaggaagtcctgcacgcggccgacctctccggccgggtcgctgaccagacgctccccgctgacgaacaggaagtgggacagggggaagtagcgcagccagtggtccaggtgctgggcgtacaggccgatgcggacggcgctccaggctgtgtccacggggcccaggccgtggcggaaggccagggcgcggaagctgggcaggcccggggtcttggagagcgtctgggcgtagtcggagatggcccgggtcacggggttccgcaccaccacgatcagcttcgtgtccggggacatggcgtggatgcggcggggggcctctcgcgtcacgaagtagctgggggtcttctccatggtgatctgcccatccagggttcggggcatcagactccggtaccaggcgaggccgcgctcgtagcacctgtcgaagaagtggggctcagagcccagcgcgcggacgtcggggtgcagccgcagaaactccagcagggcgcgcgtgccgcccttcttcacgccaacgatgagcgcttgcgggaagcgccggcggccgggaccgctggccaaaggcaggccgggtgctcccgggcggtggacggagctggacggctcggagggcgcgggggccggcgcgggggcgcgggcggccggcgggcagcggccggggagggcgcagaggcagtaggcgccgagcaccagggccacgagcagcat

SEQ ID NO: 366 - DNA, 307 bp, Homo sapiens
gcactacaggcactgattgtgctgctacctctgacagacgcccttacgatgatcgcaccctctcacacagctcaagaccccagggggtcctacaggctcaaaagcgactctgcgactctacaatatgtacacctatatgcgcacgctgccaatgctgcctgacccgtaaaatatcgggccatacgacaactcacaatggtgccacagccgcattcaaaatcacgagctctacccatccatgaaggaggcgctggtgagatacagtactgtcattgcaggcttcagtgcctgcgctcggaatgtcttc

SEQ ID NO: 367 - DNA, 354 bp, Homo sapiens
  misc_feature (1)...(354): n = A,T,C or G
gctgatccggccctagaggtacttgaattcggggctactggggtagcggcagttactggttaccgcaacatggcggtcactggagcaggagtatcaggcagactgttacgaccagcgtgacaccgtcaataatcccgacaggntcacagaagattacagnatcgcccaggcagcagcggacctcaatcagcagctggtagccgcaggcttgatgcattacgcaatggtcgaacatgcgctcggtcctatgagcggccattcactccgaggcacacccctagttctagagcggcgccacgcaggctggagattcagctttnatttccctatggtgacggggtanccttcgtgctt

SEQ ID NO: 368 - DNA, 277 bp, Homo sapiens
tctcggtgacttcaggaaactccttgtggaggacacggtgggcaccttcacaaaccttgagaaacttgtgctggagcttggctaacacccagagcaggaaggcgcccttgctgtcacataagcgataggcagagcctcttagcacgaggaacagcacagtcaccttttggagagggggctcccaccgtgggaccgcattcagcagttggagtggtgggcacacctctcacccctccagagagatcagcgggtgtgagttataaatatagacgtctgt

SEQ ID NO: 369 - DNA, 533 bp, Homo sapiens
ttttttttttttatttttaaaaacaatttatttacaaaatatttaataggaagaaaaaagaaatacaaggcattacatgtttttatgtgttttgtcatttgatctagcaagttattacagatattatccccagtcacagaagaagaaactgaggttcaataatgttaagtaattttaccttaaagtaagggcgggaacagaaattcttaacagagttgtgtggctctaacacccatgtacccttcaccacaacagatggcatgtttattatgtctatttgaaacataaattatgagcctgaaagtccaaatgttacctagagttaagaactattccttttctctagccaactcctgtaaggtacagagtcagagatatgacggtccctacagcaatgtggacaggaggtcaggctggctttcaaatccagaagacgtgaaaatctgcccacagatgcaaccacacaccaaaaaatatccttacctgaatggctcatgtggattcaccggggttggaagacaagagcgcaatca

SEQ ID NO: 370 - DNA, 201 bp, Homo sapiens
tcggctcacagacaggcctgccaggctttctatcttccctgcaatgtgactctatgcaaacaggaaaaatagcataccgaaatcaggttatagcttcaatagctgaagaaacatgaacatttccatttttaacattaactctctatcatcgtctatgagtaagttcttaccatgatttgttttcaaataaaatttatggga

SEQ ID NO: 371 - DNA, 257 bp, Homo sapiens
  misc_feature (1)...(257): n = A,T,C or G
cccgacgattgcaacgagacggctgccacctcttcgccacgcagatgaatattgctgggaagaycgycnbhcagcagtacacgctgcggtcgttgtcgggacggttcagcgaccggawcttccgccagtaawtttacgcgtataaggatgctgcgggttttcgaagaccgsgcgccgtggaccaatttcaacaatttgcccgagatacatcaccgccacacgatgactaatccgstctaccaccgccatatyggggg

SEQ ID NO: 372 - DNA, 481 bp, Homo sapiens
  misc_feature (1)...(481): n = A,T,C or G
gcaccaagttgcggaacagcagctaacagcgcacgggtgtaaggatgttgcggtgcatgaaaaatctgttcgacggtacccgtttccaccgcctcgccctgatacatcaccagtacccgatcggcaatctctgccaccacgcccatatcgtgagtgataaagataacgcccatcgacatctctttttgcaatactttgattaattgcaggatctgcgcctgaatagtgacatcagcgcggtggttggctcatcggcaatcagcaccgcgggggcatgacagcgccatcggaatcaatcatnggttggggatcccgcagagaatttatgcggataacgtgaaanatggtttngcctcaagaatgcgtacctgatccaanaatccggtttgctcgacanaggtntttacgaatngggtttgatgcaacgattgatcgggaattgtnaccccagtaaaccgggttaggatgtatggntcttaan

SEQ ID NO: 373 - DNA, 322 bp, Homo sapiens
agcgaaccgcttaccacctcgttttccagcaccagcttaacgttattgataatcatgaagaggctcccattgggtgcaggcggtcggcgacgtcattacgtacagcttcgtcatggaagatgcctacgatggctgcgccacgggttttggcttcgcgaatcagttccaccaccgcggcgctgtttttggcgtccagcgaggcggtaggttcgtcaagcagcagaatggggtagtcgacgataaagccgcgggcgatgttgacgcgctgctgttcgccaccggaaaatgtcgatggtgccaggtgccacaggcgttccggcac

SEQ ID NO: 374 - DNA, 302 bp, Homo sapiens
  misc_feature (1)...(302): n = A,T,C or G
tcaggctcagttccgccgtcagacgagcatcacggaattcctacttgggggttcataggtttcgccagttgcaggtcgtgagtaaccaccaggaaggcggtgcctgcaagcgattcaattccccaagcaactggaagatgctgtcggcgttaccgcatcgaggttaccggtagttcatccgccagtaccaggcgcgggttattcaccagcgcacgggcaatcgcaacacgctggcgttcgcgccagnaaagttcagatgggcggtgattcccacgatgatccagccccacggcttttaacat

SEQ ID NO: 375 - DNA, 201 bp, Homo sapiens
gcatagtaaccaatgcgcgcgttctcagaccattttacggtgccgctgtccggttgcagatcgcccaccagcgttttcagcagcgttgatttaccgacgccgttggtacccagtaccgccagtttttcacccacttccagcagcaggttgagatttttaaacagcggaccgttatcaaaccctttggtcagaccttccact

SEQ ID NO: 376 - DNA, 380 bp, Homo sapiens
gtttgctggggcaaacgggcgggtaaatcgaccacctttaagatgatgtgcggtttgctggtgccgacttccggccaggcgctggtgctggggatggatctgaaagagagttccggtaagcgcgcccatctcggctatatggcgcaaaaattttcgctctacggtaacctgacggtcgaacagaatttacgctttttctctggtgtgtatggcttacgcggtcgggcgcagaacgaaaaaatctcccgcatgagcgaggcgttcggctgaaaagtatcgctcccacgccaccgatgaactgccattaggttttaaacagcggctggcgtggcctgttcgctgatgcatgaaccggacattctgtttctcgacgaaccgac

SEQ ID NO: 377 - DNA, 127 bp, Homo sapiens
cttcatgtgttccatattcagcaatttctctttggtcaagaacaagaaccatattagcattcttactgttgtaaagacgatggtcaataactaacaccgttcttacattcaatagtagacctagagc

SEQ ID NO: 378 - DNA, 211 bp, Homo sapiens
agagatctgcaaatatgattgcactttccaaaggcagaacacatacgatgttctgttcactatgtgctgtccatatggcatcagagatgtgctgcatagccagtgatgttatactctctggatcacaccttatattcacatgcaaacttaaatggtagtctatgccccactttttcttaactgacagagcatagtctgtacactctacgtt

SEQ ID NO: 379 - DNA, 611 bp, Homo sapiens
  misc_feature (1)...(611): n = A,T,C or G
gtaggtactggtagaatcgcgcaggggaatggcctgccgcacttnctggcgggcagaaacagcgagtggcgctggcaagagcgttgattcatcgaccgggattattgttgcttgatgaaccgctcggggcgctggacgccttaacgcgactcgagatgcaggatttnattgtttcactttggcaggagcacggctttaccgtactgttggtgacgcatgatgtgagcnaaggtnagcnntggctgaccgggtgctgttaattgaagagggaaaaattggtctggatttgacagtggatatcccccgtccgcgtcgagggngggcccggtacccaattcgncctatagtgagtcgtattacaattcaantggccgtcgtttanaacgtcgtgacttnggaaaaccnnggggttancccacttaatnggctttnagaanatncccnttttgncagttggntaaatgcgnnnaggccntaccntttgcccttccaanaatttccngtttaatggngnattgnaaatttaagggttaaatttnntaaatcnggtaaattttnttaaannaggnnntnttngtntgtgtgttnntntnnnntgnttgtttntntgn

SEQ ID NO: 380 - DNA, 407 bp, Homo sapiens
ggtcgacactggccttcgatatgaatctcgccttcgtcgtactcttcgagaaaggccatgctccgcagcagggtgcttttgcccgagccggaagggccgatcagcacaccacttcggaatgccggacctgcaggtcgatccccttgagtacacgcagggcgccgaagctcttgccgacattgtgcaggcgcaccatgggttgcgagtcgccggggagttgttcggaggtcttcatggggtcaccttgtttcgggacaatgggtggcagggggcgttgttggatagtcattgcggctgcctgctcataaagcggccgacccgggtctccaggaccatgcccaggcgtgaacagaactccaccagcagcagatagccgatacacagcaccagcagggtttcgacgaagg

SEQ ID NO: 381 - DNA, 219 bp, Homo sapiens
agcaaaagttgataactcctcgccccccaccctggacactgaccatttaaaaatagatgcctttctgtgccagcagctgcagatgcctgccaagctccttgactctcccattctgaaacaccaccattaactctccattctggatggtggacagcccgagagcaatcacaatcgcggtgcgcccttctatgcgtctgcccacggcttatcggccaacct

SEQ ID NO: 382 - DNA, 416 bp, Homo sapiens
gggtttcagtagtccggcaatgagcccgagcaatgtggacttaccggccccattggggccgacgatcgccaaggtctctccgggcgcaacggtgaatgcggcgtgtacaccccgaccggaatgccctgcctcgaatcgcaactcactcatcgccgccacccatcgcggcgccaggcccgggctcccacaacggccagcacaaccgccgccaccgccaccagcagcagcgagagcgccacggccgattgcgcatcggattcgcgctgcagatagatctccaggggcagtgtgcgcgtgaccccctgccgggatcccgcgaaggtcaaggtggcaccgaattcaccgagcgaacgcgcgaaggccagaaccgtacccgagaccagtgccggcatcaccagcggcagcgacacccgccg

SEQ ID NO: 383 - DNA, 567 bp, Homo sapiens
taagttagcttttttgggccaatgcctttcctctcagatggagaggtgcttgccctcaacacttcaaaccctcaaagaagactcgtcggccatgtgctcaccctggactcatccctgtgtccaggggaacaagttatttcctgagtggatagcccaagccacaattcagctctgggtgaaagtggtggactgcattgctgaaagccccatgaggggtgtgggaatacttcctgaatagagaaggaaagggggtgagtgttgagccggcagtgctcactgctggagactgaccattgccgtcacccaaccttctcccttccacccccggtggtggtaacaagccgaagttgagcactggcattgatcgccctgattggagagcctgccttcatcttcctggatgagccatccactggcatggaccccgtggcccggcgcctgttctggaatgctgtggcacacgcccacgagtctggcaaggccatcatcatcacctcccataggtagagcctgggtctgtgggtcactggaagtttcaaaaccaggtaggctgggaagaagccaggt

SEQ ID NO: 384 - DNA, 353 bp, Homo sapiens
tttttttttttttttttcatattgttttgcttattaaatgttttcttttgttaacttaagtaaaaggaaacattcttgtagaattatggaaactaacaatgtagtaggacctaaaattgaatgttaggaggttcttcattttaagggtcttcctgtgggagaagtttccattcaactgttgtatcaattttatcatcaacatttcccagctcctgctctttacagagttctaagaatacctgctccaaggtagcctgagagaggctgtattcctccaggttgaaggtctgtttcactctaacttgaaaaaggcccgagatagagggtggacatcctccacaggtaacttatac

SEQ ID NO: 385 - DNA, 576 bp, Homo sapiens
  misc_feature (1)...(576): n = A,T,C or G
tccannaantnaaacaatnnntacttttacttttcttctttgtacttttttatattgtctaaattttctatatgaatgtatacagttcatgtaagaaggaaaatattttaaaatatatgtattatgccacaaaatactcctcatcaccaggcaaagctctagtcaccagggaattaagtttcctggacacagacagcccccaccccaccccaccccacctctctaccccaccaaaagcacacagtgtccaaatctccatcgtgcctgcaactcaggaacagctatctggccgcacagctctagggaaactcaaagcaggaacagctctgggtcctggagacgcccctgagaagagggcccagtatccctggggcctcagtccatcagccgctgctgcaccaggcgggaatagaggtcctgtccctcctagagctgggcaagcttctgcagcttgccctcctggagcacccaggatctggtgggcgcgctgaaatgtctgcagcctgttaccaaacaccacactttggcatcccaacggaaattccaatcctaagggccttcgcatgaaatctaggt

SEQ ID NO: 386 - DNA, 536 bp, Homo sapiens
  misc_feature (1)...(536): n = A,T,C or G
tgctccagttcgcgctgcaatttatagcttagtttgctactgctgcgttttacagtttctgcttttgccgcggcggcttcttcggtttttttcaccgcaggctgtntgagcnccacatactgctcttgctgaccacgggcatcattgataaccnccgacataacgncccaattttaccgccgccttcgaagatccaacattctgtaacggtgttatcgacaaantgacgatcgtggctaaccagcaataccgtgccctgatagctgtcgatcagttcttccagcagttccagcgtttcgacatcaagatcgttggtcggttcgtcaagaatcaataagttgcttggtttgaggaacaaacgcgccagcagcaagcggttccgctcaccgccagaaagcgcacgtaccggcgtcatcgcccgtttcggatggaacagaaagtcctgcaaatagcccaatacgtggcgtggcttgccgttaaccatcacctcttgcttacttcggcaaggttatccatcaccgtttnatcggggncgc

SEQ ID NO: 387 - DNA, 568 bp, Homo sapiens
  misc_feature (1)...(568): n = A,T,C or G
ttcgcgccgtgagatagggtcaacgccgacgccgggttcatcgagcagcaacactttcggttcgcccaccagggtacaggccagaccgagtttttgtttcatcccaccggagagcttgcccgccagcgttccggtaaacggcccaagagacgtaaactccagcaggcgagcaaaagtttgcttacgtgcctcgccggtgacgctgcgcaaatccgcgtacagatttgaggttcttccattcaccgtgagatctttcattacagaccaaatttcttgcggcatattaaccgagcacggcgtgnagcgcgccgctcgtttttgatcggatcaaagccaatcaccgtggcactgccgctgtcgggtttcagtaatcccgccaacatccgcatcagcgtggttttacctgcaccgtccggccccaccaaccccgtcacataaccggcgtgaatggtacaatcgagcggccancggcgggcttgtccatgcccggaaagcgtttttccaggccgttcagcgtgataacggcatcattcatgtcctgcctcgtcaccgaattgtaccgtcactg

SEQ ID NO: 388 - DNA, 220 bp, Homo sapiens
ttttaccaccggggcgaaggctttttccaaaaggcatcagtgaaaggggtgtggggttttcacaaaagaacagagggggaggcacaaatccgccaccttttgttgtgggggacttttatgcaaaccccgagtgtggaacactgtgtacacttttccatcccccagagggggggcctttccatgtgcaaccgggcacacggtgaagggagcaagtggaaag

SEQ ID NO: 389 - DNA, 145 bp, Homo sapiens
atggatgaacgaggctatcacgcgcaaggccgcagcggcttgttaggcctgccagccttatcttcatacaggagatagaggtggcgccccccaaggctcatgatgatcgaatcaagatcattgccactagtggttgtgccacacc

SEQ ID NO: 390 - DNA, 449 bp, Homo sapiens
tttttttcaaacaaagtttaatacaaactacaaaagactaatgggttgctctactaacacatcatacaaaccagcagccggcccacaacgccaactcaggccattcctaccaaaggaagaaaggctggcctctccaccccctgtcggaaaggcctgccttgcatgacaccacatttcggctgaatctgaagtatggcgttttactaatggaaaaaaaaagtacagaagaggctttgttctcatggctgcccaccgcaaactggcactaaaacagcccatcgctcacttgtgataggagaaatattcttcgctctttcggacatcacgctcgatggtataactgccaggtttccagccaggtggacacacttacccatgttagatagagagactggaggcctgtgctagcttcacagtctgatacacagagcggccaacagggaggtcat

SEQ ID NO: 391 - DNA, 172 bp, Homo sapiens
aggcgggggcaaaggctcactatccgttagccacccaaatggggttggaagaaaaatccctgcgctgcccccacgtggggctaaatcgggcacttgccaggcttccaccccgggggacaaatttccccaggcccgtttgggacctgaaaggccggaaccacccgaaaagcct

SEQ ID NO: 392 - DNA, 236 bp, Homo sapiens
  misc_feature (1)...(236): n = A,T,C or G
ctccagggncccanantntggantttggangggnaggtttggccttncctgggtaancatagggcacccaggtgggggnaaaggtggaaaaccagnaaangcanttaggnaggggcaaaagttnattatccnttagccagnttaattntttttggagaaatattcnttgttgtcatccaagttgggtttaatngtgtcactgnaagggttttaagcagnggganaaatttncccat

SEQ ID NO: 393 - DNA, 180 bp, Homo sapiens
  misc_feature (1)...(180): n = A,T,C or G
gtngatgagactttgagnctagttcaggccttccagnncactgacaaacattgggnagnttgcccagcttgntggataccttgcagggataccatcaagccngatgtccaaaagagcagagaatatttnttcangcagaagtgagctctgggatgtgttantgncnngctgcggntggca

SEQ ID NO: 394 - DNA, 248 bp, Homo sapiens
  misc_feature (1)...(248): n = A,T,C or G
ccccccngggncccaaactggggagttnggaggggcaggtctggccntnccggggnnagcaaagggcacccnggggggggnanaggngganacccagcanaggcaccnnggcaggggnanaagctcactanccctnagccagccnaattgtnttnggnnaaanatncccngctgtcanccncgttgggctnaancgngtcactnccagggttccagccagcgggaaaaacttccccangctcgtcngt

SEQ ID NO: 395 - DNA, 290 bp, Homo sapiens
  misc_feature (1)...(290): n = A,T,C or G
cnccagggtcccanactgnggantttggaggggcaggtctggcctttccngggnnagcanagggcacccaggngggggnanaggtgganacccagcacaggcacctaggcaggggnanaagctcactatccctnagccagccnaattntttttgganaaanattccntgctgtcatccacgttgggntnaatcgtntcactgccaggtttccagccagcgggaaaaacttccccatgctcgtctntttactggaaggcccggaccagcccaagagnccnatccacggagc

SEQ ID NO: 396 - DNA, 490 bp, Homo sapiens
  misc_feature (1)...(490): n = A,T,C or G
ggntagtttctgcganttgtgttgngactgctnatangaanangtcntcangaaatgcnaaaattgggcacnctgacnctnacttcaaagccacagctgtttatgccagatggtcagttnaaanatatcagcctgtctgactacaaaggannatatnttgtgttcttctnntacccncttgacttcacctttgtgtgccccanggagagtcattgcnntcagtgatagggcagaagaatgtnaganactcaacttgccaagtgattngtgcttctgtggatnctcacttctgtcanctagcatggagtcaatacaccnanganncaatgaggactnggacccatgagcanncctttaggnatcagacccgaancgcacnattgntcaggattatggggtcttaaaggntnatgaaggcatctngttnaggggnctnattnancattgaatgagnagggnattctncggnagatcactgtaaatgnnctcc

SEQ ID NO: 397 - DNA, 282 bp, Homo sapiens
  misc_feature (1)...(282): n = A,T,C or G
gttaaagatatcagcctgctgactacaaaggaaaatatgttgtgtctcttttncctcttgacttcacctttgtgtgccccacggagatcattgctttcagtgatagggcagaagaatttaagaaacccaactnccaagtgattggtctctgtggatctcacttctgtcatcctagcatgggcaatcacctaagaaacaaggaggctggaccatgaacatcctttggtacagcccgaacccaccattcccaagatatgggctaaagctataagcactcgtcag

SEQ ID NO: 398 - DNA, 302 bp, Homo sapiens
  misc_feature (1)...(302): n = A,T,C or G
tgataggaagatgtgttcaggaaatgctaaaattggngcaccctgncnncaacttcaaagccacagcntgttnatnccagatggtcaggtttaaagatatcagcctggtctgactacaaaggaaaatatgnttgtgtncttctgttaccntctngacttcacctntgtgtgccccacggagancattgctttcagnganagggcagaagaattangaaactaactgccangtgattcgncttctgtggatnctcacttctgtnatctagcatgggtcatacactnaggancaggangactgg

SEQ ID NO: 399 - DNA, 284 bp, Homo sapiens
gaaaataaaggttatttgaagtgttgaaggtataaaaattatttgataaacaccccaccgaattccaaacgtgctgccactgtctggcctgtgtttcgtcagtggtaaaaatggtcgctgaaaggccgaactcactataatagccagttccagtgcatgttctgcatctctcgcaaatggtgattgccgcaaaacgggccaaaaacatttcttccaaacgcgtcatttctgggtaacattcgccagaaacgtgcatagtagtacctgccccagcatcttttccg

SEQ ID NO: 400 - DNA, 429 bp, Homo sapiens
atccagtcctgtggctcgatagccgtttcctgggctatccgttgctcaaagcgttcttcttgggtcacgtcatcacctttacgattccagttttcgtgaattaattaaaaacacgaatcacattgttttatgaaagttacacaatagttaagtaaaatcacaaattttgtatgtttgaactgtgacggatttcgcaccctatttttataaatcattatttatcagtgcattaatgttttccgcagttgctatacagatcgcatagttaacatttcgttaaaagatcctttgctttttatgattcgcgatttaactattagcaacagaaatgtgaacatctggggagtagcgatgcagcagttagccagtttcttatccggtacctggcagtctggccggggccgtagccgtttgvttcmccacgttatt

SEQ ID NO: 401 - DNA, 625 bp, Homo sapiens
  misc_feature (1)...(625): n = A,T,C or G
nnnnnnnnnnnnnnnnnnnnnnnnnnnnnnnnnnnnnnnnnnnnnnnnnggagtaaaaaaattgttttccccttttttttggtctaaaaagggggggaaacttggaatggggaggcccggccccctttgggaagggggggtccccaggtcaacaggtcaacaaaagaatggggctgggctggggctgcaggaaccattttcccagggcccaaaaaacccatgagggggggccccccccccatgggacccaatttggccaggccaggcggagcaacccctccttaaggctggggaaatttgggccgggctggggggggatttgaccttcaggcctttattattcataaaaggcctcaccaggcaaaaacgggggggaaaaaaaatttcnaacctttttttgccatgggaggaacccatgccctttttccccacccccccaaagggcaaaaagtgcaaggggatgtggacaataacattnttggccgccaccccaccactggatgtttttgcaataattttcttaatcaccttgtcgttgctggaaaacatgagagggcccggggccttccaccctggtttgataacttgatggcctcctcccagctgccccccacacgatgggcag

SEQ ID NO: 402 - DNA, 753 bp, Homo sapiens
  misc_feature (1)...(753): n = A,T,C or G
gnnnnnnnnnnnnnnnnnnnnnnnnnncnttcagcgncgttaccagttgnacagcgcngattcancagctctaatgccctgacggcgtaaactacacgcgaggttatccgccgcctgattcagntcccgataactcaactgtcgctcgccgtcgataaccgcgatgntgtnactcgcagcatgtcgcgtcagaatgtcggtcagcggcaaatcctgccagtagcctttttcccgatagcgacgggcaaactcttccggccagcgggtgaatggaatgctcatcctcgntccttaatgcaatccaaaaacgttcaacatggtagaaagtttgacgcctgtttcgcgccactcacccaacggtgacgacgcaggcacaatccccgntccggcaaacagacgcacctgattttcccgcagnttcgcgcaggggatggtcaacacccattcggcgttancttcgnttgtcacaacaacccacaaatggcgncaaacnaggtcgggggtcggacgggtccaggtcaagnaaataaccctgggtcgggggcttgatggnggggaaancccntcaaggggcgggggggtcgggtttcaaggaaggacaagggccaaggggtcnaagtggggtttttcntttggngaantttcntttttggggttttttttccccccngggnngggnnttttcttcnttnnccccaaaaaaaaaaaannnnnnnnnntnnnnnnnnnngncnanannaaannnnnnnctct

SEQ ID NO: 403 - DNA, 468 bp, Homo sapiens
  misc_feature (1)...(468): n = A,T,C or G
gaccaccggacatttctcgttgccgatttttttccagtaccactcccacgcttccgggttaattggctcgcccacggaaccgagaatgcgcangagcggaacggtcggtgccttcgatcgctttatcgccttccgccatcagcgcgcggttcgccgtgggtgcggtatagagaatattgacctgatgcttgtccaccacctgcgccatacgggcaggcgtcggccagttgggtacgccttcaaacatcagcgtggtcgcaccgcaggccagcgggccgtgacagcaagtaactgtgtccggtcacccagnccacatcggcggtgcaccagtagatatcacccggatgataatcaaagacatatttaaaggtcagcgccgcgtacaccagataaccgncggtagtatgcagnacaccttttggcttaccgggtagaaccggagtgtaggagaataaacagcgggatctt

SEQ ID NO: 404 - DNA, 313 bp, Homo sapiens
tagggaatgattttgccaccgcgcgctccggcatcagcgagtacaatcagcaccggtttagcgtcatcaattcgcgccgccacgctgtgcaggcaaatccaccaaacaccaccgagtgaatagcgccaatgcgctgcaggccagcagagtaatatgcgcttcggcaatcatcggcatatacaccagcacccgatcgccgcgctgcacacccaatgaacgcaacattgaggccaccgcgttcacttcgtcatgcagctgacgaaaggtaaaggtgcgctcttcttctgtttccgaagagacggcaatcagcgcc

SEQ ID NO: 405 - DNA, 343 bp, Homo sapiens
  misc_feature (1)...(343): n = A,T,C or G
nnnnnnnnnnnnnnnnnnnnnnnnnnnnnncaaagaggtttctgaaaacaataatagtttttcaaaaacatttttgaaacaagaaaaataaatgccttcatttagttcgggataaaacccgtttttcacaaagggcaaaaatgagcccttatggggggttacattctaaagcaagaaagggaagccctaattttcaagtttaatactttaaaaattaaggctctgggggtaaaatagtttattaccttcctcccagttttttaatttgatttcacagcaaactaatggggctcccactttgccagttttggagtcccacccttggaattaaatgaaaaaaagg

SEQ ID NO: 406 - DNA, 457 bp, Homo sapiens
cacaactgcatgaggacaaagagtcgagacccgctggccatctactttaccagcggaaccaccggggcccccaagatggtcgagcactcccagagcagctacggactgggttttgtggccagcggaagacggtgggtggccttgaccgaatctgacatcttctggaacacgactgacactggctgggtgaaggcagcctggactctcttctctgcctggcctaatggatcttgcatttttgtgcatgagctgccccgagttgatgccaaagttatcctgaatgtaccagtttcagagcctgaggcactgtctgaccggaggagaggccctcaaccgtgacgtgagggagaagtggaaacaccagaccggtgtggagctgtacgaaggctatggccagtctgaaacggttgtcatctgtgccaatccaaaaggcatgaaaatcaagtctggatccatg

SEQ ID NO: 407 - DNA, 365 bp, Homo sapiens
tttgatttccaagtgttttttgttttgtgtttggtcactaggtggcctttgtttcagaactgccaaagacggtttctggaaagatccaaaggagtaaattgcgaagtcaggagtgggggaaatgaggtgcaccccaggaaggccccgtagacctccgaagactccacaagaaactaatggatcactggtcagtccccatggggagcatcatctcttcgaccctaaagatgtcaaaggtgtgcagcttccaaacggcatccccaggatcactgggcaatgctggaaagagcaaaagaatatcattggccctgatcacatagatgctgcgccgcctagcaaatgcttggtggttcgacttctccctc

SEQ ID NO: 408 - DNA, 885 bp, Homo sapiens
  misc_feature (1)...(885): n = A,T,C or G
caaaccaaggaaacatcctcagaatgaaaccaaccttgccaacccctgatcctagacctccagcctccacaacggtctttggactcagatggaattataccacggggtttcctgggtctccagcatgcagatggcagattgtggaacttctcagcctccaaaattagttttaatgctgtgtgatcatcttagtgcaccacacattttctgcattttgatttttttcttttgtggtgactcccgaagatagaatttctgagctaaaggatattttattttatgttcctgcatacttttgccaaatggttacatacaaaggatgaagcctttacattcccactggcagaaaatgagtacccacaagtgccccaagtctatggtaacctgtcctatggagggaaatctgaaagctcttagtgagaccagtgggcagatgctgagcctgcccccagacagagggagaagtcgaaccaccaagcatttgctaggcggcgcagcatctatgtgatcagggccaatgatattcttttgctctttccagcattgcccagtgatcctggggatgccgtttggaagctgcacacctttgacatctttagggtcgaagagatgatgctccccatggggactgaccagtgatccattagtttcttgtggagtcttcggaggtctacggggccttcctggggtgcacctcatttcccccactcctgacttcgcaatttactcctttggatctttccagaaaccgtcttttgcagttctgaaacaaaggccacctttcctggggtatttgtatggggcagncacccttttcacatgcttctggagttcccgcgttagtgcctttggtcatgaagagagtangctgagaaggactataat

SEQ ID NO: 409 - DNA, 617 bp, Homo sapiens
  misc_feature (1)...(617): n = A,T,C or G
ccgaagcgctgctggaaggtctcccacacatcagcccgtagtccattgcccattgccaggcggactgtatgtgtccggtcctctggttgctacaggaatgtccccagaagggtgaggaggaggtgctcttggggcatgccttggaacctttacctagagggggtgttatcctgggtccttaccttgggagttacctggaaggtgatgggggacctctacctaagggatctacctgggttacttacatgagagtagttactgnagtcttaaatagagggttacctgcaggggcgacctcagagctttgcctgggggacgttaccagaggtgactggaggcctcatctggggtctcacctaagagtagttacctagaactttaatttaatggaaatttaattttaattaattaatttttaatggaaattctcatgataggggtaggggctattatccctgttttccaaatgaggacactgaggctcaaggtagcacagctatcaaaaaaaacattattggaaaacttgtctgaaactcattatctggggttcttgcatgaagtgtattatctganggacttgagttcagtacctgaatctttacctgagacctttacct

SEQ ID NO: 410 - DNA, 514 bp, Homo sapiens
gcattggctgcgaaaagttcacggactttgcaccctgtggggcactcagatgtccagccgcactctctacattaatagcaggcaactggtgtccctgcagtggggccacctaaaagtgccggccaagattaactgtgctagtgatgtgttggatcactgggctgacatggaaaaggctggcaagcgactcccaagcccagccctgtggagggtgaatgggacggggaaggaattaatgcgtaattttagagaactgagtgaaaacagccatcaggcagcctgcgtgctctcgggagcctgtggcctgctgcgtcgggatagtgtgtcaaagatgctaggctgagtgcctgagagatggctcgagagcactcgatgcattcgagcaagactgatacttatgcctggatccatacatatgaaatccactgacatactgtgtcagttgcagatgtctaaggccaaggactgtgtcgctgaggaatgagccatacaagaagtggacactagggcgtct

SEQ ID NO: 411 - DNA, 774 bp, Homo sapiens
ggagaactgtaaaattttagcagagactgatcttccaagtccctctaagatttcttgagaatccctctcaggaaagctttggattaggttcagttctgttaactatcttctggtaacaagagggcataagtagctgagcagaagaaatatcagagttaaactggccatcttacaccaccatcttggggtccatccatattttgcagatccgcctctgaagagcacagctgtgtggaaacaggaagtcaagaaccagtggccatttatttcaccagtgggacgacaggctctcctaagatggcccacactctcagagcagttaacattgggttcaccgtctgtggaaggtagggaagaaaactctggttttgggtttgaactccccaaagagctgccaatatgtgtatccaactaatcgatacttctccttgaattgctataagatattgccaattaattgctaccaaacagaacttgtgctggccgtgcccaacctagcttagtaaatgacacaatctaaccagctgatcaagcaagaacttaagaatcgaccttaattcagtcccttaacaacaaggatatcaggaaatttttggatggtatctatgtctctgaaaaaggaactgttcagcaggctgatgaataagatctaagagttacctggctacagaaagaagatgccagatgacacttaagacctacttgtgatatttaaatgatgcaataaaagacctattgatttggaaaaaaaaaaaaaaaaaaaaaaaaaaaaaa

SEQ ID NO: 412 - DNA, 883 bp, Homo sapiens
  misc_feature (1)...(883): n = A,T,C or G
gggtggctgggaggattaaacgagtttaaagtttaaatgagtttaaagtttaaagattaaatgtgtttataggacaatgcttgcctcatgatatgcattcaataaatggtagaaactattattatttgatttattgtttatttagtttattaatcaattctctcagggatcagaaggcatgcccttggggtcttctctgtccactttctaatggttgtgagcttgagcaagtcttgtaatctctggctccaccatcctcacctgtcaagtgaggtggccagattcaaggattatctgtctttaccttcccaagatctgaagatagggattcctccaactagatggtgaagtcttactgtaaagtgcctggcatggctctaaagaagatcaatggcatagagcatggggatgatacctaggggagagggaaaggcagcccttgggggaatggtgctgtgtatagttcagggtcaataatattttgggcatgaaacagagagttcttgaggagtctaagggctaactgaagaaaaataagtcttccaatgagatcacagtgataggctgaggatggcaaggctgaatagccacttttcttccactggcaaagcatacattcttganaactggacagtctttgtctccacatctagtgcctcttggaagttcagaacatatgtcctccctcatcnccgttagtgctcccatcctcactggggaacagaggangaggagcacagtttctcaccacatagccagagaagatgcctataagcctgatgggtttgaccctgatgcccatgtctccttctgtgcccgggggcaggacgttggccttatcatctatgatcctganaaagaagcagatggaagaatgaccaac

SEQ ID NO: 413 - DNA, 288 bp, Homo sapiens
tcattgatgacaacacagaatcctgtgcattctctccgaaaaggcagttggttgctcccattatcataccagtcctgtaaaaggctggacatccactacgttgcggacaccaaccatgccacttatttggcgccatcgatggacacagacccagtcgttgccacaagtagtgtgtggactaatacgcacatactctagatactacattatcatcagtgggcccaacccaatcattaacatggtttccatgctcaaaatatcctcgccagcggcagctggacattactc

SEQ ID NO: 414 - DNA, 989 bp, Homo sapiens
ggcccttttttttttttttttttttttttttttttacagcaaggcaaatttacttctatggaagagtggtcttgcagatggagcaatggcaagatcacaccggacaagggaggggaaagtgttcttatttctaacgcagctagtccctactgttgtgtcttttccctattggatagggttggactgcacactctaagccaattcagattggctatttaaagagggcaggggtatgagctggagtggcagggtgagtagtttcagcgggaaagacagttacagagcaggtgtctaaggatgactaaggacagagcaggttactaagaatgactaaagacaaagcaggtgttagaggctagaagggggttgtttaatgaaactaggggcaaggaggcataacgaacgaggaagttaaactttaaaacggagaacaaagaacagagaagctgaacatactgacatatttgttctttgatgaggaactcagaactcattgtacttaatcttcccccctcttgaattttaaaggatgtttacaggctaaaatctttgaagaggaattcactgtatcctattcgtcaggtgttctttccaccaagctttcagccgtgtcaggtgttctttccgccaagggtgcagcctcgtcaggtgttccttcagatgttccttctggattactattttgagaatttttagatatcttttgtttatattccaaaagttgttgatgaatgcatttaaacttatcaactccatttgcatttgcatttttttgtcagtaaaaattccacaatttgctcacttcttttccttatggccaataaaagtggtgtgtggccagccttgttcttcactttaatgtctgtaccacaggacagcaattttgccaccactgacaaattctcactgttaacagcataatggacagctgtgttgccatacacatctacaatatttggatcagcaccagaatctatgagaatatttgc

SEQ ID NO: 415 - DNA, 529 bp, Homo sapiens
acagattgataagctgtattaaaaggctgttccaatttattcttccacttcaggacttgaataagcccccttccacaggtacagcctggcagtgtttgtgctcagcaaaccatgcagcgggaaggccagtgtcagctgtcagctggaaccagcatccccactccctgccctgccctgtcttatacaccacctcccaaaactatttgctctccctagggttctgggtgctgacccccaagaccaagcagacggcacccctcgccatcgctacagcccgaggctacacagactgtgctcgacacctgatccggcaggagctgagctggatgcccgtgtcgggggtcgcgctgccttgcatgaggcctgtgcccgagcccagtttgactgtgtgcggctgctgctgaccttcggagccaaggctaatgtgctgactgaggagggcagaattccttggaactctgcaacattcccgagttcctgcagtaagtgcctggggggccagacaattttggcgagaaattttctttct

SEQ ID NO: 416 - DNA, 219 bp, Homo sapiens
gggaaccagagaggaaccagaggggagagacagagcagcaagcagtggattgctccttgacgacgccagcatgagctccttctcaccaccaccgtgagcttcctccttttacttgcattccagctcctaggtcagaccagagctaatcccatgtacaatgccgtttccaacggagaccttatggatttcaagatttgcttgaccatttggagaaaagat

SEQ ID NO: 417 - DNA, 284 bp, Homo sapiens
aatgatgaccttatccaaccgtggaaaacacgtgctcaaaggggacaaacgcatcttatataaaacagaaaaataaatacgtaaatacatgaaaaaaaatgacctacttgaaaggcggccacacggttgaggaaaaagccccttgaggaatcagaatcaagtgtttgcagccacgacttcctcttaatgccgccttaccactgtgcagcccatgccattggaggagctgatccggtccatttgcctaccaaagcagacagacccttgcacacatattggggctt

SEQ ID NO: 418 - DNA, 501 bp, Homo sapiens
gcggccgccgggagggcgcgcggcgccggagacatgtccaggcggaaacagagcaacccccggcagatcaagcgttccctcggagacatggaggccggagaggaggtgcagttggtgggtgccagccacatggagcaaaaggccacggcacctgaagccccgagccctcccagcgcagatgttaactcacccccaccgctgccgccccccacatccccaggaggccccaaggagctggaaggacaggaaccagaacccaggcccacggaggaagagccgggcagtccctggagcgggccagacgagctggagccggtggtgcaggatgggcagaggcgcatacgggcccgactcagcctcgccacgggcctgtcctggggcccgttccaatggagtgtccagaccagagcctcatcccccaggcaggcggagccgagcccagccctgaccctgcttgtgttgacgaggctgctggctgaggcgctgcccagccctgactga

SEQ ID NO: 419 - DNA, 500 bp, Homo sapiens
  misc_feature (1)...(500): n = A,T,C or G
ggcgcctgagacatgtccatgcggaaacagagcaacccccggcagatcaagcgttccctcggagacatggaggccagagaggaggtgcagttggtgggtgccagccacatggagcaaaaggccacggcacctgaagccccgagccctcccagcgcagacgagctggagccggtggtgcaggatgggcagaggcgcatacgggcccgactcagcctcgccacgggcctgtcctgnggcccgttccatgggagtgtccagaccagagcctcatcccccaggcaggcggagccgatgagaaaactgaggctccaagatgttaagtcaattgcccaaatacccaggatcaaacagcagagggagaaatagaacccacatctgcctatccccggagaccctcgcaagctccttaatggtagggctgaggggctggcaccggcccaggagtcatccccacgggctgccctttgccctagctgcagtcacccctccctgtccgcctg

SEQ ID NO: 420 - DNA, 495 bp, Homo sapiens
gcggccgccgggagggcgcgcggcgccggagacatgtccaggcggaaacagagcaacccccggcagatcaagcgttccctcggagacatggaggccagagaggaggtgcagttggtgggtgccagccacatggagcaaaaggccacggcacctgaagccccgagccctcccagcgcagatgttaactcacccccaccgctgccgccccccacatccccaggaggccccaaggagctggaaggacaggaaccagaacccaggcccacggaggaagagccgggcagtccctggagcgggccagacgagctggagccggtggtgcaggatgggcagaggcgcatacgggcccgactcagcctcgccacgggcctgtcctggggcccgttccatgggagtgtccagaccagagcctcatcccccaggcaggcggagccgcgaggcgctatctccgccttggcgcccagtgtccagacacaccgtacaagatgattgatt

SEQ ID NO: 421 - DNA, 256 bp, Homo sapiens
cacatgtgtgtccccatgtgcaccttgaggttgcccttagtggtgaaggcccggccgcagatggtgcagccgaacggcttctcgccggtgtgcgtgcgctcatggatctgcagggcgctggccgaggagaaggtcttcccgcacgactggcagttgtgctgcttgggcgtccggcgcggtgggggggccttcaaagttctcgtttgaatatttgctactaccaccaagatctgcacctgcggcggctccacccggg

SEQ ID NO: 422 - DNA, 449 bp, Homo sapiens
cacatgtgtgtccccatgtgcaccttgaggttgcccttagtggtgaaggcccggccgcagatggtgcagccgaacggcttctcgccggtgtgcgtgcgctcatggatctgcagggcgctggccgaggagaaggtcttcccgcacgactggcagttgtgctgcttgggcgtccggcgcggtgggggggccagcatgggcgccaggcccgggcccatcactgtctgaggcccggcggggacctggacgcccgcgggcagcgggggaccctcgcccagcgccatggccttcccgtgaccgttcacttccattttgatcatggtgggtgcggcgctggagatcaggctaggagtgctttggctgggaccccgctccctgctcaggaacagcaggctgaagggcgcctcctccttgatgcccgcgcggccaggggcgcctccgctgcccggggc

SEQ ID NO: 423 - DNA, 407 bp, Homo sapiens
  misc_feature (1)...(407): n = A,T,C or G
cagaaaatatgcctcatacaacatgagagatgtcatacaggaaagactccctttgtatgtaccgagtgcggaaaatcctattcacacaaatatggcctcattacccatcagagaattcacacaggagagaaaccttatgagtgcaatgaatgtggaaaagccttcaccacaaagtcagtactcaatgtacatcaaagaacgcatacaggagagaggccgtatggatgcagtgattgtgagaaagccttctcccacttatcaaaccttgtcaaacataagaaaatgcacacaagaganatgggtagaatcagtcaagttgaaaactcctgtaatngagagtcacagctccttccttataagtgaactcatgcagaagaaaaccctactagtgccgtgactatggaaaa

SEQ ID NO: 424 - DNA, 942 bp, Homo sapiens
  misc_feature (1)...(942): n = A,T,C or G
gttttctatctactctcttctccctgtcaccaaatagtctgcgagcctcgagattagggtgcttttttcacttatttttgtattcctagcacccggcacaagacccaacctaaaacaaataatcactaataccttactttgagctcaaaagtaataaccacagtacacatatcctgatcgcttaatggttaaattcttcaacaaaataaatttattttcagaaatagctcctccttcaaagtcttcagaataccactcactgcttagtatttatagttgtgctggtttggagtgggatatggcgtcactttcagtgctgatcccaaaagggtgtcctccacccagatgactgtctgtaaatctccattctacaaacaaacaaatataactttagatacttagaaacaatgctgatggagttacttttgagtgacttctcacttcagtatttcaagggtgaagtgtcaattaaggcattaactttaaccatactcttctttcaatggtatcttccgatgtaacaaaagccctttggaatatatttgccacataaatcactgatgacactttcctttggcatgtgttttctggtgtttagtaaggttagaactcccatggaaagctttcccacactcttcacactcatacggtttctctccagtatggattctctggtgatgaataagcgttgagatctggctgaatgcttttccacactctccacactcatagggcttttctccagagtgaatcctctggtgattaataagtgctgaggtcacatagaaggccttcccacattccctatactcatacggctnttctnctgtatggattctctgatgcttgatgagggctgagctcacaccttgaagctttttcacactcatcacacttcataaggttctcaacagtaatgattcttctgtgttgggtaagtct

SEQ ID NO: 425 - DNA, 596 bp, Homo sapiens
  misc_feature (1)...(596): n = A,T,C or G
gctacagcagatccagctcaccgagcagatccgcatccaggtgaacatgtgnggcctcccacgccctccactcaagcggggcaggggcgacactctgaagaccttgggcagccacatgtctcagcaggtttctgcagctgtggctttgctcagccagaaagctggaaccaaggtctgtctctggatgccttgaaacaagccaagctacctcacgccaacatcccttctgccaccagctccctgtccccagggctggcacccttcactctgaagccggatgggaccgggtgctcccgaacgtcatgtcccgcctcccgagcgctttgcttcctcaggccccgggctcggtgctcttccagagccctttctccactgtggcgctagacacatccaagaaagggaaggggaagccaccgaacatctccgcggtggatgtcaaacccaaagacgaggcggccctctacaagcacaagtgtaagtactgtagcaaggtttttgggactgatagctccttgcagatccacctccgctcccacactggagagagacccttcgtgtgctctgtctgtggtcatcgcttcaccaccaagggcaac

SEQ ID NO: 426 - DNA, 375 bp, Homo sapiens
ggtaaatgtgggaaagctttcagtgatggctcagctctgacacagcaccagagaattcacacaggcgagaaaccttatgaatgcctagagtgtggaaaaaccttcaaccgaaattcatccttaattttgcaccaaagaactcatacaggggaaaaaccatatagatgtaacgaatgtgggaaacccttcactgacatctcccaccttacagtgcatctcagaatccacaccggtgagaagccctatgagtgtagcaaatgtggaaaggctttccgggacggctcgtacctcacccagcatgagaggactcacactggagaaaagccctttgagtgtgcagagtgcgggaaatccttcaacagaaactctcaactc

SEQ ID NO: 427 - DNA, 524 bp, Homo sapiens
tttgggggaggataaatatttattcagacatccgggcaattcctaccaagtgctttatgtgtatatgtcatctggtaacattggagaaaaaccatcattcactgtctcttggggtggaggatgtggacctgactctggaatcactgggaggtggtttcccggtgtgttttcaggtgacgcttgaatgtccccagctgacggaaggccttttgacaggtgggacatttgtagggcttctctccggagtgggtgcgctggtgaacgttcaggttccccttgtggctgaaaactttgctgcagtatttacatttaaacggcctctccccggtgtggatcctcttgtggccctgtaaggtggactcgtgggcgaaccgcttttggcagacgtcacacatgtagggcctctcgccagtgtggactcgctggtgaactcggaggtctgagggctgcaagaagcgcttccgacagagatcacattgaaagggtctgtctcctgtgtgtgacctcctgtggatgcttagctg

SEQ ID NO: 428 - DNA, 421 bp, Homo sapiens
ccgccaacagcgcatcctcaggggccaggccctcgtcgtcctcgcccagctcctccgcctcccctcgtgggtcctcagggtcctccagatagggcccgtcgcctgggaacagcgcctctggagagccctcgccgcctccgccgccatggtccaggggcccggccatgccgcggccagcacagtcggtgcacacaccgtggcgcctggagccatgcctgatgcccacgctggcggcggacatgaagacgcggctgcacaccttgcacacatacttcttgtccttgctgtggaccagcgtgtggcgcttcatgtgctcgcgccgcgtgaacttcttcccgcagatctcgcaggggtagggccgctctcccgtgtgcgagcgcatgtgtcgcttgaggatgcactggtgcatggccgagaagct

SEQ ID NO: 429 - DNA, 227 bp, Homo sapiens
gagttttcagatgtcttttaagacttgatccatgacaaaaacttttcccacactcaagacatttatatgtttcttcttcagaatgggttctctggtgccctataagatgtgaccgccgagtgaatcgctttttacatacagtgcattcatagggtctctcccctgtatgaagtcgttggtgtctataaaggtctgaactacgaaggaatcttttcccacattcaggg

SEQ ID NO: 430 - DNA, 247 bp, Homo sapiens
agcggccgctcgcgagagaatccatactggtgagaaaccctttgaatgtgaggaatgtgggaaagccttcagacatcgctcatcacttaatcagcatcatagaactcacactggggagaaaccctatgtatgtgataaatgtcagaaagctttcagccagaacattagcttggttcaacatttgaggactcattctggagagaaaccttttacttgcaatgaatgtgggaaaacctttagacagatt

SEQ ID NO: 431 - DNA, 615 bp, Homo sapiens
  misc_feature (1)...(615): n = A,T,C or G
tttttttgacagaagaaacatttttaattgttctggtcctgccccatcaccaggggagtcccggcactgctcaggctcactgctcttgctttcccctgggatgtcgaggacactttgacctcatctatgtcatagcccatgtgtttctcagatgccaccgccataagatctagtgccccctggtgccattgggcaaggcaggccagagaggccaggggcagctgggtgtgcaccaggccacagggctgtggggcatgcagccgatggtgcagcttcaggtggatgtgctgggtgaagcgactccggcagacactgcactggaagggccgggccccggagtgcaggcgcaggtgggtcttgaggttactggagctgctgaagcgcttgtggcacacctagcacttgtggggccgctccccagtgtgcaccangtggtgcttctgcaggtgggcaagttgagtgaagctcttctggcacaaggcacactggaatggacgctctncactgtgcacacccaggttggaccttgagaattgagagctgccaaaagctcttgcacatatgttgcactcgtacaggattttgcattcttcttttcagcgggtaaggaaggct

SEQ ID NO: 432 - DNA, 588 bp, Homo sapiens
gcggccgcactcgcgcaggtagaacggcttttccgtggtgtggaccttcaggtgctgcgtgagccgcgactgctgagaaaaggtctttttgcactcgccgcagggaaactccttctgcctgtcgtggactctggtgtggcaggcgagcttggaaggccgcgtgaagcgcttgccgcactcggcgcaggggaagggcttttgctcgctgtgcaggcgctggtgggcgcgcatggcgttcctccagaagaagcccctgctgcactccgggcactggaagggccgcttcccaatgtgctgcagcccgtgggctttcaggcttctcttgaggcggaaacttttgttacactcgggacacgaaaagggcttctctcccgtgtgaactctgatgtgctcgtccagcttaatcttgtagatgaatttcctgccacattcaccacaagaaaacggcttttcctcgctgtgcgtcctctggtgggtcttcagggcagccttccgggagaagctccggccacactcgggacagtggaagggcctcttcccgctgtgctgggtcagatggaccttcatgcccctcttcaggcggaagca

SEQ ID NO: 433 - DNA, 318 bp, Homo sapiens
actctctccaagggcgcagcggctgaaggcccgcctgccggttcactgtgcgtccaccccgaaggacagcaacttctccgaatgcatgctgttcagggtccgcacgtccgccacctcgagccgcagcttggtgaagctggaagtctccaaggccccgttcttcagccccagagcccgatgagcccgcagcagcgtcctctggagctgctccaccgtaccggaattctccattcccgatctggctgcagaagacagcaccaccgcggtgaagaggtccagctcctccccgtaagcgccacggagtgagcttctcgctga

SEQ ID NO: 434 - DNA, 178 bp, Homo sapiens
gaggaaccctttggacctggagggctggccggctctgccttgatgtagaagggctaaaggcccaccacctggctggacatggccttggacacctggggctccggcagcaccgctaggccagccatggggcccgagcggccccgagacgccggagtgagccgggggcgcggggcggccc

SEQ ID NO: 435 - DNA, 346 bp, Homo sapiens
tttgtcctatatttgtatatttatggtcatttcaaaaacaaacaaacaaataaaagagccccactcaggtgcatatttacattcttcaaactgtagcggtgaaaaataattctattaagtgcaggacattcctaatgttgcagtagtgacatttttcttaagtcttcatgaacacattgcttttgtcttaatggtgatgcattccatgactatgagacagttctcttgtccccttcatttgcagccggtggcacagtcaggattaaagagctccttgtataacggaggaaacagtgtattcactatctctggatgagattgcttaaatacctgcagcttctccccg

SEQ ID NO: 436 - DNA, 490 bp, Homo sapiens
  misc_feature (1)...(490): n = A,T,C or G
tggaacaatggccaaaaattttcaaatcaggacaatgggcatagggtgtgatcatcctgaaattatttaaaggatcctggaaactcgttttaattgctgggtggaaaacattcgtgtgacttgtccctgctgcttgaacagactgcttatacttctggatttttgggttgaggtctattctgtggatgttctttaagcattttgctaatgaatgcagtgaatctgaggcgaccggatgtantttctccaactcaaccacaaagtccaaaaaactcttctcctgggttatcttacctcaggccattggatgcttgataaagaaaatgaatgaggacacatggnattgatcgaaatgctcaccgatctctaccatcagcactgtatagtgcaaaacaaagtgaggatggctaagcangtggatctgcacagctgttgtgtcgatgtgcgagatgcatgtagagcaatcaaatcgcctcactctatagaacag

SEQ ID NO: 437 - DNA, 214 bp, Homo sapiens
aatcacgaatatgaagtcaatgacgagaattatcttggccccatttctgagctatatgattattgaagaagattttaatattgcactaggagtatttagcttagctggactaacagattagttgaatggatatatgactctaaactgggcctatcatatatcagctttggaaagttctctaggtccacttgtgataaaattacttatcgtaact

SEQ ID NO: 438 - DNA, 136 bp, Homo sapiens
aattggctttgcaccactcctgggctacttgattactgcacaacattttaatatttcactagcagtccctgctttacctggaccaacacctttgtccgatggattcattgctcgaaactgggccactcaaagatca

SEQ ID NO: 439 - DNA, 130 bp, Homo sapiens
catagttgaaaactggggttgccaatgaagctgcccccaatattaactggactgctgtattcaccttgctgatgaatgtgggttttaacctagcggtggctatgcaaggattgaaatacttggcaagggg

SEQ ID NO: 440 - DNA, 470 bp, Homo sapiens
ccgcattctttttttttttttttttttttttaaagaagtattcctttatttccttgttttgcatataaaggtttgtaacttcctagctacttcttgaatattaaaaaagaccaaatccaaaacccacttccaaacaccactactcttcctttgactcaaacttatctcattacaaatcatcagcacaatcatcctctgctgcagcacgtctttgatgagggccactcgcacaagagcactgccgttagagtggctccagcaccagagtggcatccttctcccaacaaaagaatgggaaaagatctttagatcttggtctgctaaagaacttggcactacaatgtattctggaaggcaagtggatatcatgtaaccctcgttaatagaacaaactctccacccggaagcacctgtcctcttgatttctctgtcccaatccgagtaagtttcaaagagtggagttttctggc

SEQ ID NO: 441 - DNA, 381 bp, Homo sapiens
gcccacaaaacagttttatggaataaggggcaggcgggaccaatttggttctccccaggaccagcaaagccgggggttaaagggcaggacccaaaggggggaggggcggggcggatttggggccctggaggctgggcccgggttactgggggacggccaaacctcttttgggggggcggcacctaatttgggggggagcgggactcaaatccccccgtgggggcaaaagcaacatccacatttcactccccccggggcttttgggggaattccggcagggctttctccgccacggcctccaaaaattaagggttcttccgggaaacttctacggggcccgccccagggaggggatcagagtaaaagagcttccacgacacc

SEQ ID NO: 442 - DNA, 163 bp, Homo sapiens
ccacctcagtgacagtggaaggaactttcgacggacaaatttatgacgtcactcgtgtgaccccgagatcgctctggtctgtgccttgcgagatgccggacagccgttacacctaggtagactgcgcgttcagctgctccaactcagtagtagcgctgagcat

SEQ ID NO: 443 - DNA, 525 bp, Homo sapiens
gcccccaaaacagttttattgaattagtggcatgcaggagcaattctgttcttcccatgacccgcagagccaagggttaaagggccggacccaaaccggggaaaggctgggcggaattgggggcctggaggctggggccctgttacttggggacctgcaaaactctctctggggggctgcacctcatcttggggggagctggacccaaatgcccccttgggggcaaaagcaacatccacatttaactcctcccggggctttttgggggattcctgcagcgctttctcccccacgggctccataaatttagggttcttcctggagactcttacagggaccggcccagggatgggatcaaagccaaagagcttcaccaccacctccaggaccccggaaggaacttccgagtcataagtgggggaagccccccgggggacccgcaaataggactgggcttcgccttcctggagggtttccgaccgggaccacgaattaactgctcgtccactgctccagcaggagagg

SEQ ID NO: 444 - DNA, 403 bp, Homo sapiens
caggacagttttattgaattagttgcatgcgggggcaattctttttttcccacgagccgaaggggcgggtgttagagtgcaggatccaaagcgggggaaaggctgggcggaattgggggcctggaggctggggcctggttaattggtgacgggaaaagctctccctggggggctgaagcaattttggggggggcaggaaacagatacccccgtaggttcaaaagacaaatccaaatctcaatcctcccggggcttttaggggaaaaccggaagcgtatactccgccagggtcgccaaaaatttagggttttcctggaagaatatacagggaccgtcaaattggtgggaaaaagataaagagcttccgaacacctagtgaaaccggaaggaagtgcgagtcaga

SEQ ID NO: 445 - DNA, 423 bp, Homo sapiens
cacaaaacagttttatggaattagttgcatgcaggagcaattttgttcttcctatgaccagcaaagccaattgttaaagggcaggatccaaaccggggaaaggctgggcggttttggggccctgaaggctgggccctggtaacttggtgacgcgcaaagctctctttggggggctgcatcaaatttgggggggagctggactaatatcccccctgtggggcaaaagaaatatccacttctcactcctaccggtgctttttgcggtattcttgcaccgctttctccgacacggtctaccataattaaggttttttctctgtagacttctacgggaaccgtcacagggttggaatcggagtaatgatcttcacgaccaccatagtgacccggagggaactccgaacataagtttggagccacgtg

SEQ ID NO: 446 - DNA, 279 bp, Homo sapiens
  misc_feature (1)...(279): n = A,T,C or G
acatctcccccctcccggggcttttgggggaattccggcagggctttctccgccacggcccccataaattaggggttcttccgggagacttttccggggcccgncacagggaggggaccagangaaaagagcttcccgaccacctcagtgacaccgaagggaccgtccgagtcaaaagggggggaagcccccggggggacccgaataaagtacggggcttcgcctggcggaggtttgccagccgggacacccatttaaacgtgctcgtccagctgctcc

SEQ ID NO: 447 - DNA, 296 bp, Homo sapiens
aattaagggtttttcctggaaacttctacagggaccgccccagtgaggggatccaaagtcaaagagtttcacgaccaccctagggacaccggagggaacgtcccatcaaaaagtggtggaagccacccgggggacccacatatagttcttggtctccgcctgggatggaggttgccacccggacaccccaattaactgggctcttcacctgctcagcaggagagagggtggtgaagcatttcccctggtaggacttagccgctcggttggattttctgtgcaaacctctaacgacc

SEQ ID NO: 448 - DNA, 171 bp, Homo sapiens
  misc_feature (1)...(171): n = A,T,C or G
ccaaaaaatttagggttcttcctgaagactttaacagggcccgnncacaggtgtggatcagagtcaaagagcttcacaaccacctaagtgacccccgaagggaccgtccgatataaagttgtggaacccaccgggggaccccnaaatagtactgttttccccctgggtgag

SEQ ID NO: 449 - DNA, 289 bp, Homo sapiens
gaccccccaatctaatacagcagcgccagcgtagggcacattgacagaataaaaccacctccacagaaaccaccctgataacgccaagccttcctacaaggaaccgcatagactgcaagcgcacatcatcacacgtgaccaccacctgaaggaaggccgataacaccccctgcaagacacttctcatggtggctcagcagccggtacagatcgctttgatgcctgagaaacacacggtgcagtcttacttttccacagccagcccgtcattgaacatgcaggaccgtgg

SEQ ID NO: 450 - DNA, 321 bp, Homo sapiens
attgggggaggaacggggggccccagggccccgggaggcgggaagggcttggaagggcgggggggggggcccttgagaaaaaagagccccggaagcgggggtcaaaaaaggccaaggggggggccttgggacccccccacacaggggggctgccgggggaaaaggcccattgaccggtgaaaaccccggggaaagaaacccccgggttaacccccgccgggcaaccagggaaccggagggaccccaaacccccattggggagttcccccccccctgagggagggcccggaaaacccccttcaacacccgggtcatgggggg

SEQ ID NO: 451 - DNA, 212 bp, Homo sapiens
  misc_feature (1)...(212): n = A,T,C or G
gtcctggaagcgggggtcattacaagtcaaggggtggtccttgggacccccgcaatcagaggtgcttcgggggtagagtgcacattgaccgcttagagcacagcgtaagagacacaggggttacacccacgggcagtcaaggagcggatggactttaagccacttgtnggaaattgacaccacctgatggaaggccggcaggaccctctgca

SEQ ID NO: 452 - DNA, 244 bp, Homo sapiens
  misc_feature (1)...(244): n = A,T,C or G
gcaccagcaccgtgccctggggtgcgaggatacattgactgttgagagccaacaggcccgactcctggcggctcacgcagctctcgcagggcgggagcagcaaggacccccaacgcacaaccctgtcagtgcacactagctgactctcggtgcacaggacgctctgctncccgcgggccatgatgcccaaggattctagctacatggctgtgttgtctagaatgcacacagaggacaccttctc

SEQ ID NO: 453 - DNA, 515 bp, Homo sapiens
  misc_feature (1)...(515): n = A,T,C or G
attggagcaggatcggcgagtcccccggcccccggagtcgacatggactggtaaggctggggggaggggcctatgaggaagacgaggcctggaagcgatggtcatcacaggtcaaggggtggtccctgggacccccacagtcagtggtgctgcggagggagaatgcacattgacaactgacagccacggagaacaagaccactacgcttacgccgcacgcacagacacggatccacatggactccaaatgcacatagcggtacatgcccaccagctgaggcagggccagcaggaccacctgcagcactctggtcatgcgagtgcagtaaccgacacagatggtggcggtgacggagatgcacacggcgcactcctccatatccacagtcatggtgacattgatggagcggcaccgtagccgaagcgtttacttgcatgtccatgccctgcccatgctcagcagcagcagcagccgcatgcacatgntacatctccatcgctggcgcctcctctgc

SEQ ID NO: 454 - DNA, 136 bp, Homo sapiens
caaacctcttgaccacaacgtgcacgatggagctggcaaagagaaaaacattataggctcgctctggtgagatagcctggaaatcccgtttggtttgtggagtgagctcgcctctcatgctaaccgtaagattata

SEQ ID NO: 455 - DNA, 582 bp, Homo sapiens
  misc_feature (1)...(582): n = A,T,C or G
ngggctgcanggaattnggacgaggggtncnccaagagtttngggcgcggaccnggngtacctntgcgtgcagttatgtcggngtcggtagtgtctgncatttcgnggntcttagaagngtacttgngctccactccgcagcgactnnagttnctngacgngnaccnactntatatactnntgaccgtgncgctgcagttcgnntactgtctccgcntggggaccttccccttnaactctttnctntcgggctncatctctctntgnggggagtttcatcctgagcgttttncctnagaatanagatcanccnacagancaaaagcgnntttccnaggnatcttcncaggagatgagccctntgnantngantntcctncntntgncnagcaccatttcatgnaacntatgnanntntatnnaatttnnnnattngntttgaaatcaatccgtnatttttanttaaattngangggntgnaaggnagnncatnnaacgagancatncanntccnntatnaatcnctncntaggtctaacgagnttctntngaggattgganncntanttttggaccacaatt

SEQ ID NO: 456 - DNA, 265 bp, Homo sapiens
aattttttacaaagggggttacccttctcatgaaggctttttggttgggtacttcctcaaaaaaatcattattgacctccaaccccccccctggaatgttcatcaaaccctcaaaggggggctttgttgtcttgggaaaaaaccaggctttgggttggccatgccgctgctttaaaaaggccaactaaatttctttttcctcctccctggccctttgggacaggtttttcaaacaaacctggggagaacccttgaggtaaatgaa

SEQ ID NO: 457 - DNA, 208 bp, Homo sapiens
ccggaatgtttgccgaggtgacgaaacggtccgcctccgtagggacaaacatctaaccgtcctccagcgccactaggccctgacttatgaccactgcaggagctcgccggctctccactccctcgaagaagttgtactacacgttcacattgtgcgaccaggcagagatgatcctggagcgcttggggatcactatgatcagggatgg

SEQ ID NO: 458 - DNA, 433 bp, Homo sapiens
  misc_feature (1)...(433): n = A,T,C or G
agcggccgcacccagtgcctctgcaaacctggttatgcaggtgcctcctgcgagcggtgtgcgcccggattctttgggaacccactggtgctgggcagctcctgccagccatgcgactgcagcggcaacggtgaccccaacttgctcttcagcgactgcgaccccctgacgggcgcctgccgtggctgcctgcgccacaccactgggccccgctgcgagatctgtgcccccggcttctacggcaacgccctgctgcccggcaactgcacccggtgcgactgtaccccatgtgggacagaggcctgcgacccccacagcgggcactgcctgtgcaaggcgggcgtgactgggcggcgctgtgaccactgccaggagggacattntggtttcaatggctgcggnggctgccgcccgtgtgcttgtggaccggccg

SEQ ID NO: 459 - DNA, 215 bp, Homo sapiens
  misc_feature (1)...(215): n = A,T,C or G
ggcagtgcggccatttggggccagcctgtagccagacgaanggcagntgcactggnaagcttccaagatggtgatgcagcggtaggagcagatgtggccccccgtgggcanggcgcactcctcnatgtcttcacaagtgacttcattcacatcgctgaactggtagcctcgccggcagtacactggtaagaagcggagacgttggacaactctgg

SEQ ID NO: 460 - DNA, 430 bp, Homo sapiens
agtaatgtatgtgttctgcactagattccttggctttgcagatatcatatttgttttaccctccactgtatcttcagttcctgtaatgtgtcaataaatacccctgaagtaaaaggatgataaagtctaaggttgtgcataagcatatcacttattgtgaagtatatctttaatttttagagaatcttataaatacataaaattttaaattatacttatcttaagccaaagagaatgggcaaaataggtatcttatacagattattagttggttagcttcttcctacatcattctgggtaagtctttcgcgttttgaaccatccagattggccatttcaatcacagactgcttggcatcgcaccagtacaactttgcagttaagaagtcaatcgtattccactgggccaggattaatcagagctgctata

SEQ ID NO: 461 - DNA, 1057 bp, Homo sapiens
ttgcattttcatagttttatttgataaaattccatcttacattctgtgtattaaaaaaataatatttctggtgtgaggctgaggtctcctctgtgtgtgtacccaagctgaagggtggtgagaacggaccactccagtctgaggggtggaagaggtgaggaagggggccagaaagcccccacctccatcacagtgctgtggtctttccaggctcagggggcaagtcacgtggcagggggagccctgctggcagcatgctaacctgacactcctggtcctggcacgctggagcatagtgtggggcagggtagcaacagggtccaggggggcagacaccccggcgccaggccctcagggtcagcaacacagtagccagaaccagggcagcagtgagggccccaaacaccaccagggccaccaagctaggctcacctagcccagcctcttgcctccgcaccacctccttcactgagatccgcagcagaccagcccctgcgctgtggggggctggccccgtggcaggtaccactacagctgaggtgggccctagaggggtgtccactgtggttggggggtctgggacaggtaagacaagctcacaggtcttgccaccatagccactggggcagaggcagtcgaagtcgtggacacggtcccgacagcgggcccctctctggcatgggcggcttgcacagtcatccaggttgatggtgcagaagcgtccagcaaagccctcaggacagaggcaggagaagcggtttatgccgtcaaggcaggtggcaccgttagcacaaggccgcatcaggcagtcatccacatttacctcacagcgggcacccacaaaagcccaccaagcagcggcacgtgaagttgagagcaaagccctggtcgtcctggcactgcccgccattgcggcatggggagcctgcctgttcacagggtccagccttgcgctcgcagtcacgcccatggaagcctttgtcacagaacttgcctgcccagccactgtggcagatgcactgccatggctggtggcaggtaccgtgctggcagccag

SEQ ID NO: 462 - DNA, 253 bp, Homo sapiens
ataccaaacggtctacatgggtgatgccttgtgccacaagcaggtcgcacttaccagcatagatttaacacacgacaccaatagatacaagctgccgcaagacgacacgggcagcatggccctgaactacggcctgaaagaccagcacctgttggcccacccgaatgccctgtgggagtgcatgaactctgtaatgtgtctcatgaatgctactgcctactacatgatgcgtggggcgaatccccacaataac

SEQ ID NO: 463 - DNA, 235 bp, Homo sapiens
gcataaagcggtaaggaaaaccccgggagtatttctgccaggccaggccgtacttttgaaggaactggcgttaatcccgggcctcacggggcaccaacagcgcggtgaaataaaagaggtaaaaatagggcaacaggttttaaaccccgcagggcaaggaccaaaccaaagccatgatgaggtttccaaaatagttgggatgggggaccataccccaccacccaaacaccaacag

SEQ ID NO: 464 - DNA, 226 bp, Homo sapiens
gctcatcccgcacctcacggggcaccatcagcgccctgacgtacaggagccagaagtaaggcagcatgcctgacaccctccacaccaaggaccaagccagatccaagatgaggactccaacatagtagacatggcacaccatacccaaccacccacacaccaccagttacctccctgacgctgtagagatgggatgagccccatccacacatgcgtcagaggagtc

SEQ ID NO: 465 - DNA, 154 bp, Homo sapiens
gggttggcagccggcctgcgacggcgccgggctcggaggtggccgagttggactggctaaactccggcctggggagcggcatgttgcacgagcgcggccggggcagcgctcgacattccgggtcgatctccaccacctgtggcgccgtcggcat

SEQ ID NO: 466 - DNA, 240 bp, Homo sapiens
aattcaattcgacataatctgtgcctacgcatttagttcattcgtgtgcagaatgtatgaactggaaaaagttcttggtggatgctcattccacatggtggttagagcggtaaatctcctatgatatgagctggattcatggactgcaacagtaaatgtgttatgagccccagccgatctgtcttgaagatagcatctctgctgtctgtccagtacggtcatgcggacagatctagatca

SEQ ID NO: 467 - DNA, 167 bp, Homo sapiens
aattcaattcgtcataatctgtccctacacagcaaagtaattcgtgtgcagaatgaatgaactggaagaagttcttggtggatgctcaatacaaagggtggagagaactggagatctactatgagaagatctgcatacattgacaagcacattgagattgctaagag

SEQ ID NO: 468 - DNA, 202 bp, Homo sapiens
caacaccaactgctcagtggtgcacactcgtcaggccctatgcatgaagatgtgcgtggagtatgacaagatgattgagaaaggacgcaagagatattgtcacatagataatgacaatgatgtgaaaacaaggaaggcgctagacactgattacatgtacacacccagacaagacgtatacctgaggagacgcaagatgaac

SEQ ID NO: 469 - DNA, 540 bp, Homo sapiens
  misc_feature (1)...(540): n = A,T,C or G
nnnnnnnnnnnnnnnnnnnnnnnnnnnnnnnnnnnnnnnnnnnnnnnnnnnnnnnaaaacctcaaaaaaatattcaggattttattagttggaatatttctacaaaattggggggggcttttcctttaggggaaaacagctttcccccccgggggccttataacccaggaaaggcgggggatgcaaacgggcaaaaggcggggggaagctccccaggctgaaactggaccanttaggagtgggcttggggaacgggagctgaaaccccggaccaaaaatggtcacccgtgctctggagcaggcctggcggacccataaggatgccgggactagcactgcancttggggatgctgggggagaagcgcttgaactttttttgccccttntgccaccgtttaaccgaggggaacaccagctccccaccctgtttntgtcccatgaccaagaaggggcgcgttgatgtngttcatctcctaacaggggcactggaagctgtttttgagccacagcaccgatttttcaggtccctttggacacac

SEQ ID NO: 470 - DNA, 339 bp, Homo sapiens
  misc_feature (1)...(339): n = A,T,C or G
acgtcgaatcnaagccgcgtccggacagcaatgcgtacacgtcgctgaacctgccgccgcatacggatttnccgacgcgcgagttgcagccgggcgtgcagttcctgcattgcctggccaacgaagcaacgggcggagacagcatcttcctcgacggcttcgcgcttgccgatgcgctacggcgcaagcattccnggccgatttcgggcacctgggcgtcgacgccgtntcgagttctnggaacaagagtncgaacagcgactacccgctgttcgggcgccggtgatcgggctnggatgcgcgcggcaacgttacgggaggttcgcttcggaaactttc

SEQ ID NO: 471 - DNA, 199 bp, Homo sapiens
ggtggtccacggcgaggatggtttggacgagatttccctacccgggagcactctgcttgctgaactttgggatggcgacattcgcagccaccacctccaccccagcgatttcgggctgaaggtacgcgatctggcgacgctccaagtcagcagcatcgaacaggcccgggcgttatgcctggaagtgctcgcgggtcgg

SEQ ID NO: 472 - DNA, 559 bp, Homo sapiens
  misc_feature (1)...(559): n = A,T,C or G
cgataagttcaaagaagagtgtgggattttcggggtttttggccatccggaggcttccacacttacacagctcggtctttttgcactgcagcaccgcgggcaggaggcttgcggcattgtttcttccgatggaaatgaactgcatcagtttcgttcgattgggctggtagccgatgtttttgatgaagaaactctcagaaagctaagcgggaattctgccatcggccacacgcgatattcaacggcaggccgcaacacaataaaagaggtacagccattttccgtcatctgccagcatggccaattggcaatctgccataatggaaatctgcctttcgcggatgtaaggcgtcgggaactcgaacgcgaaggtgcaatcttttcctccacatctgatacggaaacgattcttcacagcattgcccgaacgccggctaacaatgtcgtcgaagcaattacaagtgttctggcagaaaccgaaggcgctgtntcattgctgtttctgacactggattcgttgattgccgtgcgtgaccctcggggatttccgccgatggtg

SEQ ID NO: 473 - DNA, 231 bp, Homo sapiens
  misc_feature (1)...(231): n = A,T,C or G
aggacttttatttttttcanacccaagttagccngagntgactcncantgtccccctanctacccacannccccanccaacangnngnaanatttgctttcacantacagcanaaagaccaccnaagctttgacagctgacttgtagggggncagcgtgcgggcagaagggncagnggcattganccncttgggcatccagtaatggcncagccagtcagcccggcctggg

SEQ ID NO: 474 - DNA, 392 bp, Homo sapiens
  misc_feature (1)...(392): n = A,T,C or G
acacncnagtnagcctgagttgactctnattgttcnnctcatcnacccacagttcncatccaacacgaaganananttgntttcacatnacagcannaagaacaactaagctttgacaggtganttgnagtgggtcagcgtgcnggcagaagggtcagnggcattgatccanttgggcatccagnaanggctcagcagtcagcccggcctgggnaanggcgttcaaanacttgacggnagcaaccattnttctttggttttaggagnattgcagggaaatttntngggngcacttggcancaattgcctcancaaactgancgttccaagnaattcncggtaanattttaanacnngnaatttttaantgangtccttccntcncgganggc

SEQ ID NO: 475 - DNA, 427 bp, Homo sapiens
ttgggacttttatttttttcaaacccaagttagcctggggtaactctaatggttcccctagtaacccaagggccccatccaacaggaagaaatttttgctttcacgttacagcataaagaccacctaagctttgacagcggacttttagtgggtaagcgttcgggcaaaagggtcaggtggattgacccagttgggaatccagtaatggctaagaattcagcccggcctgggtaaggggtttcaaagacttgagggtagaatacccttctttggttttagggtattgaggggaaattcggggctgaattggccataattgggtcatgaacctgaggttcaaggtggtcctggaaaatcttaaacctggaattcttaacggaggttataccataactggaggtcttttttgggtcgccaaagaagctc

SEQ ID NO: 476 - DNA, 467 bp, Homo sapiens
tacttgtaagtaaattaaatcattctctactcctgtatgcctgccaaccaaatgggaaatcgctatagaaaagatggtttaaattttagtctttgaagtggtttacgcacgtttctggaatcaagatttaatgcagacttggattggatattgaatattttttatttgtctacttttctctccatagggagtttatagcttcattgcactgtgtgtggcatttgggtcctgtttggcagcaatgactgcctttctgtttagtgtctgtgtgctatgaagagtgcacacaggggtccagatgcatcctgttttgagaatgttaatggatacaccagctgctgctttggatttcacccattggtggtagttgacccgctgtttgtttggaatgcagacaatttaagtgaagacatatccatatatgtggctctgttacagtggtgaaatctacaacataagaaggtgca

SEQ ID NO: 477 - DNA, 372 bp, Homo sapiens
ggactttaattgtgtacacacccaagtgaggctgagttgactctgagtgatggcctatctaaccacagtccgcatcgcaacacgaagaaatatttgctttcagattacagcatggagaccacccaagctttgagagctgacctggagtgggtcagcgtgagggcaaaagggtcagtggcattgatccacttaggcattcagtaatgggtcagcagttcagcccggcctgggtaaaggcgtacaaagagttgacggcataggtatccatctctggctctaggaataatgaagggaaatatctgggccgccaataccagcactgcatcatcaacccgatgttcaacgtatccctgtcaagtgtaaagcaggaat

SEQ ID NO: 478 - DNA, 198 bp, Homo sapiens
  misc_feature (1)...(198): n = A,T,C or G
cgccnttcctggantccgaggcagcngnccagccaccagccntgcggacgacngcttncaccacagcaatgaaggtggacgcnatctngntttnatggncccnngtctccaggnctgcagtcactacctgggcaatntttctctncactntcgnnacgttgggcanaagctngttgtgcagccgaggntcctncacgg

SEQ ID NO: 479 - DNA, 358 bp, Homo sapiens
  misc_feature (1)...(358): n = A,T,C or G
ttttttcagcccgcaaaggcttcccgcagcttggcgntggcctccatttattgcgctccctctgtcccacccagaggcggcatgttctccaacgtcccactcttgctcctgttcccattctcgtcccttggctgcgggtcaatcttgcctcttccgggcactcagtagccagcaggttccccgccttttctggagtctgaggcagctgcccaaccacctgatgctcgaacgacagcctgaactacagcgatgaaggtgggcgtgacttctgtatggtggtgccgaatcttcaggcctgcagtcaccacctgatcaatgtctttctctaccgttgtggtattaggtaaaagctggttgt

SEQ ID NO: 480 - DNA, 387 bp, Homo sapiens
  misc_feature (1)...(387): n = A,T,C or G
ccactagtaccatcaacctctactttggctccaaggtcctgtctcgggtcagtggcatcctgtttaatgatgagatggatgacttcagctcgcccaacttcatcaaccagttcagggtagccccctcaccagccaacnttcatcaagccaggtaagcagcctctttcatccatgtgtccctcaatcatcctggataaggacggccaggttcgcatggtggtcggagcctcagggggtacccagatcaccacatctgttgcactggccatcatcaanagcctgtggttcggatacgatntgaagagagctnttggaggagccccggttgcacaaaccagcttttacctaataccacaacggtagaggaaagacattgatcagggtggn

SEQ ID NO: 481 - DNA, 690 bp, Homo sapiens
  misc_feature (1)...(690): n = A,T,C or G
aagggccagggggccacccggcgccgggaacaggggcccaatttttaacgcgctctgggctccaagggggaacccgttcccccaaagtctctttcctctcctggcgagaaacctgtccctggattgtttgttagccttgttctgccggagcacccagtagccagcaggttccccgcctttcctggagtccgagggagctgccagccaccaaccggtgggaagaaggcttcaccaccaaaatgaaggtggacgcgatctgggtgtgtatgtgccgggtctccacggccggagtcactgcctggtcaatgtttctttccactgtcgtgaggttggggagaagcttgttgtgcagccggggctcctccacggccctcctcaagttatagccgaaccagaggttgttagataaggccagtgcagtgtctgtggtgatctgcggcccccaccagcctccaacaaaatccggggcgtggcggcctggccaccaagaatgtcggggaaaaggaaaaaagggctgcctccctgtcctgattaaatttggagggggggggcggtgccaaaactcattggtggttggggggagaggtgaatgtgtcatttacttattgaaacagatcccactgaccggggaggacaacttgggagcaaaataaaggttgtatggttntggttgggcgacaaacacttccg

SEQ ID NO: 482 - DNA, 394 bp, Homo sapiens
  misc_feature (1)...(394): n = A,T,C or G
gccagggaggccaccgggacccgggcacaggggcccaattaattatgctggtttggtgccaaaagggaaagcccgccccccaaagcccttttcctaaaccgggggagaattttgcccctgaatggcttggcacccttgtttgccgggaacactaaaaacccaaaaggttccccccctttcctggagtccaaggcagttgcccaaccaccacccgggcggacaagggtttgccccaaaagaaaaaagggggacccaatctgggtggaagggggccgggtcccaagggctgaaancactgccgggaaaaggtttctttccactggcggaacgttgggaaaaaacttgttggccaaccggggctcctccagggcccttttgagttaaagccgaacca

SEQ ID NO: 483 - DNA, 193 bp, Homo sapiens
aacttgctgaacctatgcttgtggatctgacacggccggcagttgccggtttccagccttctcatcaacatttggatgccttcctgtagagactttaagacgcgatagtcatcgatgtccgaggtgttatacaccatcttgtgggagaacatactcctgaagaaccgcacctgctccatccaccacatcatga

SEQ ID NO: 484 - DNA, 409 bp, Homo sapiens
  misc_feature (1)...(409): n = A,T,C or G
ntnaaaaaataaaacccttcttnatttcagcaattgaaagtcctaatgtatttttactgtgaanaanaacaatatttttgaaaacnaaaattacctataatttcccatttagaagaaaatattgcatgcaataggactctgtcaaatcaaaatgtgaattaagataaccaattgatcagtaatttgcatcactcagcaaaaatgatttgacagtaaattactgggactggtatgtgcatgctacagcattgtatgttcagcatcanaaaataaaataaaatgcaattaccctaaaagacatttcaagattctctccancccagatatccattcctgcatcgtaagttcctatctcttcaaagtagtttctgtcaatagaaaataggccaccagccatagtaggggtcct

SEQ ID NO: 485 - DNA, 172 bp, Homo sapiens
tagaaacacccgccgggcaccacaggtctggatggatgaatacatgaatgtctataatgcagcagtgtcttcagctagaaacgttccttatggaaatattcagagcagattggagcttagcaagaaactcagctgcaagccctttagatggtaccttggaaatgtctatcca

SEQ ID NO: 486 - DNA, 354 bp, Homo sapiens
tttttttgacttcaaagtgggacctttattcaagacagaggtgaaatctgtgctgtagtgaaagtgccatcgaaggcactgagtaagggtctagagctcagtgcaccactcaggcatccctggaaaatagtcttcaagaattcggtgatgtcactacagggcccaaggctcagagacagataagctttgggggaacagaaagaaacaaactgaggtggcattagggaagaggtattccaggagtgtggagtgggcaggggtgccaaggacagcagacactcacaacttctcacaaagccactgttccagcttctcagtgcagagggctttatgggccaaccagtagtcaattcc

SEQ ID NO: 487 - DNA, 161 bp, Homo sapiens
  misc_feature (1)...(161): n = A,T,C or G
ntatgagtacctctgcannggtnantnttgnatggntccccaaagtgnatcagaagncagncttcnngcagaccctnnncnntnncctcatnggatncgccagctagctacttatgttcacagcanaggtctanggctaggnantnatncagatattngaa

SEQ ID NO: 488 - DNA, 285 bp, Homo sapiens
agaaagcctttaaagcatctgcattgtattttctaactgaagcaaaaaagtggccgtggggatttttggggattcctaacattggaggtcattcaaaagacccaaggcttctttttcacaggggggagctttgttgtggagcaggaagggtttaagggccatccctttaccaaggggacaaatgcggttggttttagagcgggggccaccaatctccttgcgggttaatataggtacagcacgggttaagctgggggagggcgttccccaattcaaagttgtctc

SEQ ID NO: 489 - DNA, 351 bp, Homo sapiens
attcccccccgatttcaacttcctttttatctttaggggggaaagggaaaaaatttgcccccctattgaagaaccaatgccccagtggaaaaagatcgtcgtccaaaaaaattagggacaaatatttcaatgtctctgccaggaagaaactctgctgcccatcatcaaaactctcatgaagaagggaaacatcccttaggccgggaaagcccccattcaccctgcaaaggttttccaaggcccctacggcttcccaggcccatttcctgtactttgggtcaggagtcagtctccacataaacatgtaagtctcaaaaacatctggccggaaggaggagtatttttaatttt

SEQ ID NO: 490 - DNA, 191 bp, Homo sapiens
gatccttcatacccagtcgcagattgacacgtgcatggggaatgcccgtcgtggtgttgaatgccggcaacaatcggtagcctagctcgcgtgccatctcaagcatttcacccttgtaccagtgcatcacatccgcctgtttctgcaggtactccctcggatagcacagttgcctaatcactagtgaattc

SEQ ID NO: 491 - DNA, 235 bp, Homo sapiens
cactaaggagaccacccagtatgcaaatagagctctcgaacacgctgacggacacatccttttctaagtggaaatccttcgacacccacttgctgcctatctcggatgctgaggttatacccaacatccacatgacgcacaacccgaatatcttggcgagaccctggccaaacctctcactggatgaccacaacacaggcttctcctcgacatgggcccgtacactcttgcggta

SEQ ID NO: 492 - DNA, 524 bp, Homo sapiens
  misc_feature (1)...(524): n = A,T,C or G
nnnnnnnnnnnnnnnnnnnnnnnnnnnnnnnnnnnnnnnnnnnnnnnccttaacagggcattttatggaacaggaaaaaaacactgaagggggcaaggataaaccaaacgggggggggggttgcacaaaaattcctacccccccatggacagaaagacttntgccccctttaatttaaaacgggactttggcagggccggggttgggccgtaaaggcctggttaaagaggaggcctcacagagagcaaatcaaatcaaaccaaccattgggtcaatctgtcgcatgtaaatgcttttaaagggcagggagtccctcctttaataaggaacacaatggcagtgggagctggagttgatgactttaaactcatgaggtttcggcctgggcacagactttccccctgggncctgccctccctcttaaaagaagaattccttccatggcaatccccgaagatgctcatccacagatccaatgggccctctgtgggaaccatgtatctggttccagacttgggcactga

SEQ ID NO: 493 - DNA, 476 bp, Homo sapiens
  misc_feature (1)...(476): n = A,T,C or G
nnnnnnnnnnnnnnnnnnnnnnnnnnnnnnnnnnnnnnnnnnnncccaatttattaaaaaaaatagattttggattcacattcaccccagggctttgggggataacagcaaggaaacccctgaaatgaaatgaggaaggtttgaattactggtttccaaggggctgggggcaaaacccaaaaccctttgtcctttaaaagccaaaggggcatgagggttttggttcccctcctttccctcctttcagaagttttaagccatggccagtaaaacaaggttggtccagccggggaaagggcggcagcccatgcctcgcccattgggggcactgttctgttcccaaaaaaagcctgtagcctggacctggcgccatactttgcctaccacgttggcccggagctaaccgtggagtttggcagcccgaccctgggaggaccctccaaatgcccataggggtggagtgctcccaaagccag

SEQ ID NO: 494 - DNA, 199 bp, Homo sapiens
  misc_feature (1)...(199): n = A,T,C or G
agaagattcgtgtggacantttgnananccanntnangnataaccacatggagctggtcngactgtgctatgacccagattntgacaaactgnagccannanacnnggagnanctnccngaanagctaaagcncnactnnnagtgtctggggaagcggnnatggttngcagganacnagatcaccntttgtggattntc

SEQ ID NO: 495 - DNA, 548 bp, Homo sapiens
tcttagaaattttattggtcctggagaaaggaaggcaaactctgcctcccgctcagagtccccccaaccctcactgtttcccgttggcattgatggggaagttcacgtactcaggggaaggcaagaaagccttgaacttggggcgggcgcttgagccgaacataatgctgaaaacaaggggaacggattcaaggaagcaagggtaaggaacctaatgattaacaagaagttcaagaaggttgtattcgcggaagaaaattttggcttcccaaattggagggcctggcttcctgggttcttggacaacagggtcttcaaaggcttcaattggccgggaagtgccttcacatagttcaatctttgccggctcatagttggtgtaaatgaaggagatgtaatttcaacggaggttctccaagccgtcatttcacatgttcaacaaggctggctcctggtggttccttccataaagccccagggttcgggccaagtttaccaggattgtaattgaatggtacaaggttaaggctcccgtctggaaaattggg

SEQ ID NO: 496 - DNA, 668 bp, Homo sapiens
  misc_feature (1)...(668): n = A,T,C or G
aaagtttaactggggtaatccccacccagttttaaaagggaccccagccccattaaaaaaaccggttttttcaaacggggaaatctggtttttttaaaaccccactttaaggggtggggcaaaaaccaacaccccttaaactcagtgggggagggggaaaaggccattttcccagcgattaaattaaaatttggaggattccccaaaaatcctttttccctttaagcctttaaccccaaaaaaaactcagggggaccccagnaacaaaagggcttttctttgaaaaaagaaaagaaagagcgctgcccccttacggacaggaaaaaaaaaaaaaagttttgnaggtttgccttctggtaaaaaaacaggctggttgcccccagtgggccattttgttgttgaggggcattttgcaaaacggaacaacctggaaggggggggggattttttccaaagcctaaaaacgggaaagaaaagccttaagtgtgggaaactcatccaggcccttgggngaaaaaatacgggttttacccaagatattttggggggaaaaaacccaaaaggggagcttttcccccggaaaaacatgagaaatttccaaaaaacaggggagaattggttcaggtggccagggagctcttccaaaaactggggggtttcatttttcg

SEQ ID NO: 497 - DNA, 277 bp, Homo sapiens
gcatcttgcaaaacggaacaaacgggaggggggcagggattttctccaaagccccaaaacggcccatgaaacccttcagggtggggaacccatccaggccctggggggcaaataaacgggtctgacccaagatataataggggaaaaaatccccaagggggggctttcccccggcaaaccatgaaaattcccccaaaaacagggaaaattggtccagtgggccaggaaccctttccaagtacgggggcgttagtttttcggggccaaagctcgaaca

SEQ ID NO: 498 - DNA, 247 bp, Homo sapiens
ggcagagctgcaacagagactgatcagatgagtgcggtgatacatcacttggacctttatgataggcactcgactactatcttcttcagtatcctctcacatgctgtgctcgcgagctaggtctcgcaggcacgacatcgctctgtgagatcttgtaattcccatccagtatgataggtgtattctgagagaccatgtcttgctttgacttcacatccgccattcgattcgatcacttacaggagct

SEQ ID NO: 499 - DNA, 447 bp, Homo sapiens
tggcccgtggaaaaatgaaggcgaactctgcctcccgctaacattcctcccaaccctgaatgctttccgttgccattgatggggagggtcacgtactcacgggaggccaagaatgccttgatactaaagccgtgccctgaggcgccccacataagcttatagctgggggaacgcatccagacagtcaggggctaggacctcatggatcagcaacaagaccaccaggctgaagtcagcgaaggagatctggactcccacaatgaaagtcttgcctccctgggtctgggacagaaggctctaaaaaggcttgagttgcccaggcagtgccttcacataaccaaccttgccctcctcatatgaggtgaggatgacggagatgtatttgcaacggaggtcctccacgcccacattcaccatgtgcacccaggctgcctcctgctggtcctt

SEQ ID NO: 500 - DNA, 506 bp, Homo sapiens
gcaaagctcgaaccataaccccttacagacaggatcaatcaaaaaaagcctcttcaagggtgcctcctgctaacatacatgatagatagccccactcgtggcacccttgaagttgatgggcatctatgcagaaacgatcatactgtaaatagtgaattgatttttgataaagcactggcaacggcgcaatgaaagccttcaggtttggtaactaatactctcacttgcaggcaaaaatacctgcactcatccaagatatcaaaggagagaaaatccacaaaggtgagttttttcccggctaaccatgagaattccctcagaaacatggagaattgtaacaatcgtccaggtatcctctttcaagtactgaggcttcacttgttcgaggaaagagctgtaccaaaacctataagctgtgtacggaaaatccctgaattgcctctctatcatagacactctaatctttcttcttcactctcacctacaatgacgtgcttgcagagcga

SEQ ID NO: 501 - DNA, 674 bp, Homo sapiens
  misc_feature (1)...(674): n = A,T,C or G
nnnnnnnnnnnnnnnnnnnnnnnnnnnnnnnnnnnnnnnnnnagctctcttaaaaattttattgggcctggaaaaaggaaggcaaaccctgcccccccctcaaagtccccccaaccctcactgtttcccgttgccattgatggggaggtgcacctactcaggggaggccaaaaaggccttgaacttgggccgggcgctgaggccccccacatttgctgaaagcagggggaacccctcccggccgccaggggctaggaccccatggatcaacagcaagtccagcagggtgtagtcagcgaaggaaatctggtctcccacaatgaagggcttgcctccctggttttgggacaacagggtctcaaaagggttcaattgcccgggcagggccttcacataatcatccttgcccccctcataattggtggaaatgagggagacctttttgccgcggaggtcctccaccccgnnattcaccatgtgcaccagggctgcctcctggtggtcctttccataaagcccacaggtgccggccaagtgaccccagagtggattggactcgtacagggtggaggctccgtcctcaaacctgaggagctgcgcctttaggcaagaagctttgaatgaaccctcttacaacgactccacggacacacgtcccttttcaggtctagccc

SEQ ID NO: 502 - DNA, 211 bp, Homo sapiens
  misc_feature (1)...(211): n = A,T,C or G
acggtggtaactgcctcagcaggaacgggtgcatctccagcgccagtgcagggaccaggatgtagtcggtagcgtgctgcaggatcatcactgtgatgactgtcttgtttggcggaatcctgtgcaccagtctccgcaatccggtatagcaggcgtataattcgcaatgagggcaatattctcgntagtccgtcacaggattgacggtgtt

SEQ ID NO: 503 - DNA, 184 bp, Homo sapiens
accccggaaaggcttgtgggtccctaaaataaaagaggcctttaagagcctggggcatatttgccaaatggaccctaaaaggggaaaacccatcacccaaatgttcatctctgacaagggtttttggggcatcctgaatttctgggcagaattttcaaagcggaaccttgattccaaaccagcc

SEQ ID NO: 504 - DNA, 259 bp, Homo sapiens
cggcggcggggacttcgcccttggcactgcccgcggcgcggaatttcggctgcccgtcgtcttcctactctcccagcaggagcgcggtgggcgggggcgcgatgtatctggacgccaggcgcattttctctatcttggacagcttgcggtgcagcgtctctgtgggggggagcgggcgcatctccttgaaggccgtgctcacactctgagtgcgatccctctcccgcgcgttttccgcctgccgcttttgtactattac

SEQ ID NO: 505 - DNA, 446 bp, Homo sapiens
agcagcgcgcgacagagctgacgccgcgcccccgccggccccatgtccttcgccacgctgcgcccggcgccgccgggccgctacctgtaccccgaggtgagcccgctgtcggaggacgaggaccgcggcagcgacagctcgggctccgacgagaaaccctgtcgcgtgcacgcggcgcgctgcggcctccagggcgcccggcggagggcggggggccggcgggccgggggcggggggccagggggccggccaggccgtgagccccggcagcggcacacggcgaacgcgcgcgagcgagaccgcaccaacagcgtgaacacggccttcacggcgctgcgcacgctgatccccaccgagcccgccgaccgcaagctctccaagattgagacgctgcgcctggccttcagctacatctcgcacctgggcaacgtgctgctggcgggcga

SEQ ID NO: 506 - DNA, 334 bp, Homo sapiens
cacccagtgctttgctgtcatttgacattaacatagaagggaattctgaagcctgcaaggacaggatgttgatatccctgttgagggtggcaagcggcgacatggacacctggttctgttcgcttttttggtgacgcacgctgactatcgtggcatgccagtccagggtcctctgcacgcccaagattgtatctatgactcgcttgacgatctccatcttgctatccttattgctgtgggggatgctgttgaccaactctttgatgctgtagtactagtcgttcaaggtggatatgcatgacaactggctctggcctaagggtttcgttggcga

SEQ ID NO: 507 - DNA, 553 bp, Homo sapiens
acagcagcagcggccgcagcagcagcagaagcaagcgccgaagctgagaccggcggtcgactgccagcccttagggggcgataacaagtcagcgtccaagcaagtcaagcgacagcgctcgtcttcgtccgaactgatgcgctacatacgctcgctcatcttgagcggcttttgctacggcctgccgcagcattagacgaccgccgtggcgcgccgcaacgagcgcgagcgcaaccgcgttaagttggtcaacctgtgctttgccacccttcgtgagcacgtccacaacggcgcggtcaacaagaagatgagttatgtggagacactgcgctcggtggtcgagtacatgctctcgctgcattatctgctggacgagcatgacgcggtgagcgcagacttccaggcaagcgttctgtcgagcagcatctccactcactactcgcacgacttgtactgcatggtctgctcgccgatatcattctactctatagacgacggatcttactacccgctcagtacagaggagcatgagctcctcgacatcaccaactgg

SEQ ID NO: 508 - DNA, 316 bp, Homo sapiens
gataccgcattacgatagtcaaacctcaagggggaggcagggggcgaggcccaagcaaggcaagcgacaccgctcgtgttcgcccgaactgatgcgctggagacgccggctcaacttcggcgggtttggctacagcctgccgcagaaacagccgggcgccgtggcgcgccgcaacgagcgctagcgcaaccgtgtgaagcgggccaacctgggctttgacaccctacttgagcacgtccacaactgcgcgtccaacaagatgatgagttaagcggagacactgcgctcgagggtcgagtacatgcgctcgctgcac

SEQ ID NO: 509 - DNA, 384 bp, Homo sapiens
tttttgaaatgctttaaaatgtttctcatttttggagttaaaaatcaaaggctagagggtccactggatgtcactgaagtccccagggtctcccaggcccccctctgcttctaagtaattcataaatgcagccatggctgtgtcatcattgtcacatagacaaattttccattcactgcaaaccgggttataaattcagttggtttcacattaatctctccactgttctgtggaacaatatatggctgtaatcttccaatggccacaaggcaggtaaaattactgttgtctttcttactgttcctttcttcttccattccaacaatatttggaggccagcttctcaagtaaccagtgcaatggatagtatagaattttctgtgc

SEQ ID NO: 510 - DNA, 443 bp, Homo sapiens
ctccgacttgccttatattacacaaatgggggctaaggaaaactgtttatgtggctctaagataatacagctgctaatgaagtgggctcttgttttaatgaagcaatgcggcaacttggacccttttacatctgccccatgtgattagatgcccttaccattccagggtgtgggccgtccaaggacagagggggaggctctgaggacaccttctcttcctcccttctttacagacacgcagctttcggattaagattcctttctcagacttgctgctacatactgatgatgacggccaccgactggtggatgatcatgatcttgacctgcagcttgtcactcttgcagtggatctgcaccatgacggccgagctctatgaaagcctcgatgatgtcacggacccgcacacactctccggcattgatggccatactccgctcct

SEQ ID NO: 511 - DNA, 172 bp, Homo sapiens
tcagcagaagtagcatcatcagcaggcaccgcagctgacaccggtggccgacgttcagtcctcacggggcggtcacaagtcagcccccaagcaagtgaagcgacagagctcgtcttcgcccgagctgatgcgctgcaaacgtccgctcaacttctgcggctttgcctacagc

SEQ ID NO: 512 - DNA, 178 bp, Homo sapiens
gcctcaccttcttgctgtgggggatgctgggcaccagctacttgagcttgtagtaccagtccttcatgacgtatagcatgctcatcgagagctacacaggggtagtgatccgcaagatgcccaggctgaggaacgacaagctgttattaactactgaccttacgggactgatggcctt

SEQ ID NO: 513 - DNA, 205 bp, Homo sapiens
acatcagcatcattgggcgccgtatttgataccggctgacgatggtcagcccttaaggggcggccacaagggagcgcccgagcatgtcatgcgacagcgatcgtcttcgccctaactgatgctctgtatacgccgacttaactttaatggctttggctacagcctgccgcaccaacaaccggccggcgtggcgcgccgcaacgag

SEQ ID NO: 514 - DNA, 365 bp, Homo sapiens
ccctcgtgacgaggctcactgcggcctccaactcctgggctcaagctgtcctcccaactgagcctcccaaagtgctaggtgtgagccactgcgccaggcctgtctgtcccgtctgacacacacacagcctcccttggtatcacatcccatgtgcgcccttccctgctgagcagacagcacatccctggtcagcagctgccccctcacctcctttgccaccggggcctgcccgccgcctcagactgcggtcgaggagctggtgtgtccgtgtggggctggcccccgccatcagccgggccgtggcctcatgtaggaacacctgggggccaggagagtggaggctcagggctctccatctccaccac

SEQ ID NO: 515 - DNA, 229 bp, Homo sapiens
tcatgagcattggcaggagcagcagcagcagcaggcagccgtagcatgtagaccgtgagacgactgtcagccctcaaggggcggcctcaagtcagcgtccaattaagtaaagcgacagtgctcggattcgccctaactgatgcacttgaaacgccggttcaacttcagcggttgtggttacagcctgcctcaacaccagcctggcgacatggtgcgccgcaacgagcgc

SEQ ID NO: 516 - DNA, 366 bp, Homo sapiens
cggctggggcggcaatacccgcccccgaggcgaccgcagggcccgccgtcggggcactggccggagctgcaggcacggacgctggctcgcgcttgttcacggaaaaggcgaacaccacggcggcatccacgcactcggcggccgagtgggcgagctcggcatgcagggcgagccctgcgcggacggctcccgtagccccggcgtgcccacgacccacaaggctggcggcgccggcttccagcgactgtgcggtggtacctgcggctgggcggcctgtgccgagcatgcagcttcttgctactgagcgctccagctagtcgcgggcggagaagccggctcacatgcagacctgtacgattacctggt

SEQ ID NO: 517 - DNA, 253 bp, Homo sapiens
ctacaacttctttgtatacaacctgccgcatcagcatccggtcatcgcggcgctgcacaacgaacgcgaatgcaaacgccttaagctggtcaacctgatctttgacacccttatggagcacgttcacaacggctcagcctacaagaagaaaattaatggggagacaatgtccttcgtagacaagcacatccgcgcgctgcagcagatgctgtactagcattactcgcagagcgacggcttccaggaaggtgtg

SEQ ID NO: 518 - DNA, 220 bp, Homo sapiens
gtcccagctggcgcatgcatgcttccatgtggcccatcaggcgggagcgcacgttggtcgggacgcccttgcagccggccaggaagcgggtcaccttcgccatacactctaggaagccggcgcggtacttgcccagaactgcggggtcggcgctgaacgctgccgtcacctgcacgcaacacatgcttcccaggtgtctcacagtcatcttcatgaagtc

SEQ ID NO: 519 - DNA, 423 bp, Homo sapiens
  misc_feature (1)...(423): n = A,T,C or G
ggaaagttgtgantgtcgancttgatcctggcgngccgcggagttcaccctgnggcccnggacnanagtactagctcctgtgattagattgaattctccaacaacaacatctcagattatggcaagaaagaaaaggagagggattatagagaaaaggccgtcgggatcggataaataacagtttatctgagttgagaagacttgtgccaactgcttttgaaaaacaaggatntgcaaagttagaaaaagctgaaatattgcaaatgacagtggatcatttgangatgcttcaggcaacagggggtaaaggctactttgaccgcacacgctcttgccatggacttcatgagcataggattcccgagagtgcctaacagaagctgcgcggtacctgagctccgtggaaggcctggactcctcgga

SEQ ID NO: 520 - DNA, 441 bp, Homo sapiens
gggcgccggcactccggtccccgccgctccccgtccccgctgctcctagcccctgccgcgtccccggcggagcgggcatggcgccacccgcggcgcctggccgggaccgtgtgggccgtgaggatgaggacggctgggagacgcgaggggaccgcaaggcccggaagcccctggtggagaagaagcggcgcgcgcggatcaacgagagcctgcaggagctgcggctgctgctggcgggcgccgaggtgcaggccaagctggagaacgccgaagtgctggagctacgggcaggaggaagaattttgtagagctgccagcgctctcccaggttcacccacccagccttcaccagccctgtgcgggctctgggggcagaggtggcaggaatggtgctgggcactagtgttccaggcagccctgggctaaacaaaagcttgaact

SEQ ID NO: 521 - DNA, 493 bp, Homo sapiens
gggcgccggcactccggtccccgccgctccgcgtccccgctgctcctggcccctgccgcgtccccggcggagcgggcatggcgccacccgcggcgcctggccgggaccgtgtgggccgtgaggatgaggacggctgggagacgcgaggggaccgcaaggtgcaggccaagctggagaacgccgaagtgctggagctgacggtgcggcgggtccagggtgtgctgcggggccgggcgcgcgagcgcgagcagctgcaggcggaagcgagcgagcgcttcgctgccggctacatccagtgcatgcacgaggtgcacacgttcgtgtccacgtgccaggccatcgacgctaccgtcgctgccgagctcctgaaccatctgctcgagtccatgccgctgcgtgagggcagcccctggtaaccagcccagtcaggccccagccccgtttcttaagaaacttttagggacccaggcttcaccagccctgtgcgggctct

SEQ ID NO: 522 - DNA, 420 bp, Homo sapiens
ttaccgcaaatgaaacactgtgtaaatatgtggattacatcctgtaagtacgaagagaatggaaggcatttatcttgttattgtcactggggcagatccggagtcagctctgggcggagatggatttaccctgagctgctgaagcttaagctgggggctgctcaggagcctggatgtagagtaggaagcagttctgagcatggaggggaagccaggtgtgccagccagaagcatcctcccggcccagcagcggcaggatgagccccttaagctggctcaggctctggttgatgcgcgcgcgccggcgcttctccagcagcggcttcaggctcttgcgcagctccgccgcgtcccctgcccggcgaggcagccccatgctccgcgggggaacggtggcagctgcgagccccacgcaaaggg

SEQ ID NO: 523 - DNA, 1768 bp, Homo sapiens
  misc_feature (1)...(1768): n = A,T,C or G
gaattccgaaaaagaaaaagaaagaaggggagagggctcccggcagcaccaggaccgacgcgcgcaccagctccggagcccagctcgcgcgcgtctgtggggccgcctgactccggggccgaggcggcggcggcggcagcgggcgcggcggcccgggctgcgcgccggcgcgggaccatggagcgcgggatgcacctcggtgcagcggccgccggggaggacgacctcttcctgcacaagagcctgagcgcctccacctccaagcgcttggaagcggctttccgctccacgcccccgggcatggacctgtccctggcgccgccgcctcgggaacgcccggcgtcctcctcctcgtcgcccctgggctgcttcgagccggctgaccccgagggggcagggctgctgttgccgccgcctggaggaggcggcggcggcagcgcgggaagtggcggcggcggcggcggcggggtgggtgtccccgggctgctagtaggttcagccggcgttgggggcgaccctagcctaagcagcctgccggccggggccgccctttgcctcaagtacggcgaaagcgcgagccggggctcggtggccgagagcagcggcggcgagcagagccccgacgacgacagcgacggtcgctgcgagctcgtgctgcgggccggagtagccgacccgcgggcctccccgggagcgggaggtggttggcgcgaaggcagccgagggctgctccaatgcccacctccnacggcggcgccagcgtccccccggggggcctgggcggcggcggcggcgggggtagcagcagcggtagcagtggcggcggtggcggtagcggtagcggcagcggcggcagcagcagcagcagcagcagcagcagcagcaagaaatccaaagagcaaaaggcgctgcggcttaacatcaatgcccgagagcgccggcggatrcacgacctgaacgacgcgctggacgagctgcgcgcggtgatcccctacgcgcacagcccctcggtgcgaaagctctccaagatcgccacgctgctgctcgccaagaactacatcctcatgcaggcgcaggccctggaggagatgcggcgcctagtcgcctacctcaaccagggccaggccatctcggctgcctccctgcccagctcggcggctgcagcggcagcagctgctgcnctgcacccggcgctcggcgcctacgagcagacagccggctacccgttcagcgccggactgcccccggctgcctcctgnccggagaagtgcgccctgtttaacagcgtctcctccagcctctgcaaacagtgcgcggagaagccttaaacacacccccgaaaaacacaagaccgacccaacaatctagaggaaagcgaaaagctgctccccaccccctttatttttggtcctctcgtagttgtgaaacacttgcagagcaaacaaaccagaggcaagaactgaggagaagtatcagagacaaacgggacttttanccttgacatccccagaatctcggtctttggggtggggagggagggaggagggaggtggagttgggatggagtatggatgtcttttttttctcagaaaagtggcaactttggtggcagcctagaccgcgaggaagtggaatcttccttaaaggtgaaacataagttgagaagtagtgcttggttattaagcctggagagtgtttgaatggcaaaatactaatcctactaataattgtggatttggctagtgctgagggggagaggagggaattc

SEQ ID NO: 524 - DNA, 278 bp, Homo sapiens
  misc_feature (1)...(278): n = A,T,C or G
nnnnnnnnnnnnnnnnnnnnnnnnnnnngatttaataaagttttatttttccaaatgtacagctggtatggtcaggaaaataaatagatgccaaagcctttccaagtgcatcacctgtctgtgagcttccagcagcattccctttggttcctaaaatgctgtctgatccattgatgggaggaggtgtgtgaggcagcaacgtaaggtgaactgctggtactgccgcgatgaaagctggacattggtggaagactcgtgtttatgtctggttggtgaac

SEQ ID NO: 525 - DNA, 656 bp, Homo sapiens
  misc_feature (1)...(656): n = A,T,C or G
ttttacatcgccatcactttattgtactgtcacccttaatttaactataaatactacggtgggggctagtcgcgggcggcctcgggctgctgggctgtgcgcgccctgaccccagacgccgaccctcccggctctgtacactatttacagctcctcgttcctctttctcgaccccctcccgcaaggcagcgcgtgtgcaagaaagtagcatcgtctgtctgtgcaagtccttcgagttaggtaagtaatacgggcaagtgtcccgcggccgtcagctgtccgagtccaaatcgcttttaccttcctcttccctcttctccggtgacgccttcgacgacgacgtcttgttccacttctccgcgttctccgactcctctgatgaggaccgcttctgccgcctccatttggcgcggcggttcttaaaccagacctccactttctcctcgcggaggtgcactntccgggccagctgctcgcgcgtgcccacgtccgggtacttggtctcctggagaggntctcgagagcttcgagctgctcgtcagtgaagagggtgcgtgccgncgctttcgncgacagtgcagctggttgagaagctgcagctcgggtgcgcgacagcgtgccacgttcatgtagggcagcatcttgtgcgtaccggg

SEQ ID NO: 526 - DNA, 394 bp, Homo sapiens
tccccgcccaacaaaaaaaaagacgcgcaccgtcttaatcgcgcacccaggtgtaccagctcgagtccaccttcgacatgaagcgctacctgagcagctcggagcgcgcctgcctcgcctccagcctgcagctcacggagacccaggtaaagacttggttccagaaccgccgcaacaagtggaagcggcactctcggctgagctggaggcgaccaacatggcgcacgcgtcggcgcagactctggtgagcatgccgctggtgttccgggacagttcgctgctggtcgtgccggagccgcgcacgctcgcctttcccgcaccgctctactacccgggaagcaacctctccgccttacctctatacaacctatacaacaagctcaactactgaccg

SEQ ID NO: 527 - DNA, 477 bp, Homo sapiens
gcggccgcggcggccttggggcacccgcagcaccacgcacctgtctgcaccgccaccacctacaacgtggcggacccgcggagattccactgcctcaccatgggaggctctgacgccagccaggtacccaatggcaagaggatgaggacggcgttcactagcacgcaactcctggagctggagagagaattctcttccaacatgtacctgtctcgactccggaggattgaaatcgccacttacctgaacctgtcggagaagcaggtgaaaatctggtttcagaaccgccgagtgaagcacaagaaggaggggaagggcacgcagaggaacagtcacgcgggctgcaagtgcgtcgggagccaggtgcactacgcgcgctccgaggatgaggactccctgtcgccggcctcagccaacgatgacaaggagatttcccccttatgagggagggcctcctccctcacatcccccgctcct

SEQ ID NO: 528 - DNA, 198 bp, Homo sapiens
tcttttgcatcttcatccttcgattcttataccatgattttgacctgccgctcggtgagagtgagaacccggtccacctcatatcgactggccctggttaaatacagattgaagagatactccttctccagttccagcgtctggtacttggtgtatgggcagtgcttcttcctcgtggatcgggcgtgaatctcagtt

SEQ ID NO: 529 - DNA, 286 bp, Homo sapiens
gagctttcatttcgggtgtgccccctatgactgggccggtgtccctgatcgcacgcggctagaacgcggctgcagcgagataggtatgcgcacacttggccgatgagagcgcgcgggccacctctccccgcatcaggggaagcttccgtggagccgcctaggccccagcgtgggcgtctggctacaaggccgccagctatcgggacgagggcaccagcttctgccttcatgcctcttgcagatcttaaggcgacagcaggctgctctgctgctgcctcatatctag

SEQ ID NO: 530 - DNA, 172 bp, Homo sapiens
cagatcagatagagctatacataaagagtagcggtctactaaaagactgggttggtggtatactggaaataaggtgccgtagccattagattcgattatggggcaacctcattctgtttcgttaatacacatttatcagcaggtgcgagtaacatagacgaacgtcgcaatg

SEQ ID NO: 531 - DNA, 398 bp, Homo sapiens
  misc_feature (1)...(398): n = A,T,C or G
ttttatgttataagaggtttataagattgtctttccaattaaagttttaggttaaagttctcatttgaatcagattatttcaaatataagaaaatttgtgataagcattgaagatagaaattggcaaacatatgtccctctcccagagataacaggtggtaggttattaagagttacttgttgagctgagcagtggaggcatacatgaaggaatgatcagttccaccaaactctttgttggttgggcttcacccaggcagctggttttcttcctttaacctgnccagtgcagtcaacagtatntgttgtgccttctgaaactttaataagtgggagatcaaaatcaccagtgctattcattttaagaaattgcctcacttgcgagcagccggaataaa

SEQ ID NO: 532 - DNA, 287 bp, Homo sapiens
gatccgcaacgagttgttcaccgcttcggtggccgcgcgccttcctgaacgatcgccggatccgcgtgagcaagcgcacccagatcgaggagtcgctgatcggaaccggctttcccttccgcatgatttcgcagatcgacgactacctcaagatgctgcggccagtgatggagaaggctgcgggcttgcgacgatccggcctgcgcgctcgacatggcctacaccgctgccggacgcttcgacgggttcttcgagatcgggctcaagcgtgggacgtcgcgtcgacg

SEQ ID NO: 533 - DNA, 331 bp, Homo sapiens
ttttgaccctgccaacaaagggaaactggttttcacagggcccatcctcccattttgggaaccccgggctggggggcaggcccccccagtacccagaataaaccctggtgggggccccaatcccccaaaacttgtgggaaacccgggcccctctgtcccagggcccgggggggtttttttgggggtcaggggggcccacccaaactttgaaggtattagtgcctccttctttaaaaagggaggcccaagaggcccccctggccggggtgacacaccaccccaggtgggcccaatttatgttttgcgaataaaaatctgcaccaccccacgc

SEQ ID NO: 534 - DNA, 445 bp, Homo sapiens
  misc_feature (1)...(445): n = A,T,C or G
tcggaacgaggtttgtaggtacctggaaacttgtntccagtganaactttgatgattatatgatagaagtaggattnggctttgcaccagganantngctggcatggcaaacctaacatgttcatcagtttgattngggatgtgttcaccattaattctganantacctttnanattactgagatttccttcatactgggccaggnantttgacgaancactggcagatgacaggnnantcaagagcaccataaccttaggatgggggtttcctgggtacatgtgcagaattggggatgggaaaatcaaccaccataaagaggaaaacgagaggttgataaactgggtgggtgggaatgccttccatggaaagggcgtcantttccacggagatttttatggaggagnaggcataagcccaaggggacntttgaccccggggacc

SEQ ID NO: 535 - DNA, 162 bp, Homo sapiens
  misc_feature (1)...(162): n = A,T,C or G
accanctgtnangttgcagacagtctgagtntttntgccntcngctgtggtttcttcanncttctctcccngggtacnngnnnnctgtgttgttttcaaagtgctctcagtttttatggtnaggtttttaccntcacnngtgatgatacantctggcttggc

SEQ ID NO: 536 - DNA, 307 bp, Homo sapiens
aattaactgatcatgatttattcaattatacaactctttcaaaaatcacatcgtcttccgtatcagaaatctgaattgtatttattgctatgttctgcattttgttgttggtctcagtctgttgttagcctggatggagacaaacttgttcacatacagaaatgggatggcaaagaaacaaattttgtaagagaaattaaggatggcaaaatggttatggtaagtaatgacaattctccattcttccttgtttttttctcctctccggcacacctctcacctccttccttcttcttccctcctcctt

SEQ ID NO: 537 - DNA, 357 bp, Homo sapiens
  misc_feature (1)...(357): n = A,T,C or G
cttctcncatnctagnccagcatcactatggtggangctttcctgggcacctngaanctagtngacagcaagaatttcgatnactacatgaagtcactcggtgtgngnnntgntaccaggcaggtnnncatcatgaccaagcctaccacaatcatcggaaaagnatgggggacattctcaccctagaaanacanagcaccttcnngaacanagagancagctttaagttggnggtngagtncgatgaganaacancagatnacangcaggtcaatgtccacttgngacacctggatggangggaaacnngttcagctgcagaaatnggacnaggcnagaggccacacttngtncggg

SEQ ID NO: 538 - DNA, 243 bp, Homo sapiens
  misc_feature (1)...(243): n = A,T,C or G
aagaataatcctagannactcacnnaatgtgtnntgcntncgnaggtacctggaaacttgnctccagtgaaaacttngatgattatatnaaagangtaggagtgggctttgcaccagnanagtgncgtgncatgncaaacctancatgatcntcagtgtgaanggggatgtgatcaccantnattcaattntgaaggancttttaaaantcctgcgatttcnttaanacngggccaggaattt

SEQ ID NO: 539 - DNA, 313 bp, Homo sapiens
ttcctcatttaacttatcttagtcattctcttaattaactcctggccagagtaataatgtaagttttagtcgacttttgcataaatccgaatacgggtcgcgttcttcgggacaggctccaccggtagtttcccgtctttgcagtttcatgttactatacattcctgccgatccgagtcctgattgctaaggaatggcgcatctataaattttcacacaatcgtggtttttgtgccatgccctgtggtttcttgaacatctctccgagggtaaaaaaagacgctcttgtttatcgagatgctctcatttttat

SEQ ID NO: 540 - DNA, 471 bp, Homo sapiens
acgtaaccatattcactaaaatcaccttgggagaaaattagttgcttgctaaattatggaaaacaacaatatactcatgaacaatatatcccacagaaagttgtatagaacaatgcgaacttcagtccatgtcaacgatgcttggtctatgctttctcataaactctcctggaagagacgccttacatgacacattccaccaccagacaataatcctcacgcttcccctacatggaggatgaatataccattccaattctgcacatgtaccagtacacccccatataaggatattgtgctattcactttactgccaactacagtgactccgccaaaaaaccatgtcccaacattaatgaaatcccactatatttaaaagtactatcacaattaacggggatcacatactcaattcatcactgctgcatattatacgactggccatgccaagcactttactagttgctaagc

SEQ ID NO: 541 - DNA, 283 bp, Homo sapiens
cagaaagacatttatttattaacggaagggatgatcctaattaatccaacagcatttggaatagctgcatgtaaaatgttgacgctaaagataattggacacagtaatgatacagaaaagggagactcagtatggagatttgctcactggactgagcttggtcattctcttaattaactcctggccaaagtgccgatggaattttggtctcgcttttgtcatagatccgagtacaggtgacattgttcatgagacactccaccactaattacccgtcttgcaa

SEQ ID NO: 542 - DNA, 563 bp, Homo sapiens
  misc_feature (1)...(563): n = A,T,C or G
tttttttctaagtctaaaaaggttttatttaatcaacataaccatatccaataaaatgcatcttcagaaaaaattaattgcttgcttattagtggaaaatcatatctttaaaaaaaaacaataaatcccgactgactattgtagtgtttgatgcaaatttccatccaggcctcttcctttggctcatgccctttcataaactcttgtggaagtcacgcctttcataacacattccaccaccagcttgtcaccatctcgttttctctttattgtggtcgactttccatcccacttctgcacctgcaccagggccccgccatctagggttatgatgctcttcaccttcctgtcgtctgcggtgatttcatcgaattccacgcccagtttgaaggaaatctcggtgtttttaaaagtactctctgaccggatggtgaccaaatccccatttacgctgatgatcatgttgggcttgnccatgcctgccactttccttgtgcaaagcccactcccacttctttcatgtaatcatcgaagttttcactggagacaagcttccaggttcc

SEQ ID NO: 543 - DNA, 620 bp, Homo sapiens
  misc_feature (1)...(620): n = A,T,C or G
nnnnnnnnnnnnnnnnnnnnnnnnnnnnnnnnnnnnnnnnnnnnnnnnnnnnnnnnnngggccctggctttggtttattgcccccaaagccccctttgggggcggttaaaaaaaaaaaaaaaaacccccttcccccctgggaacgggaacgggaccccgggcaggggcccccgcccccaaaaaaatttggggatttggccaaaaggccaaggaaaaaatggggcaatggggggcttaacccagggggaccccattggcaaaaaattattcaccaaccggggaggcagggcatgcctttttttaaaaagggggagggcaaactgcanggccgggggggagggtcaggaagagttttcccttaattaactcccgcacaaggggggttttttgccccccccatttttgggggggaacaagtttccctccatccagggggaaaagggacttgaccttcctgggatttgggtgtggttaatagaactccacccccaactaaaagctgatttttgggttcttgaaggggctgggggttttaaggggggaaagggccccattctttttaaggaatgggggaggcttggtcatgctgggcaccctgcctgggaaaaaaaacccaaccg

SEQ ID NO: 544 - DNA, 351 bp, Homo sapiens
ggggaaggatattaagggggtgtcggaaaccgagcagaatgggaagcacttaaagttcaccatcaccgatgggtgacaaggcgatccagaacaaattcactgggggggaggaatgagaactggagacactgacgggggagaaagggaaaacagtggttcagttggaaggtgacaataaactggtgacaactaacaaaaacatcaagtctgtgaccgatctcaacggagacatagtcaccaataccatgacatggggtgacatcggcttcaatagaatcaccaagagaatataaacaagggtgcatttcataccattctagtgtggaaaactaatgtaatattagcgaactt

SEQ ID NO: 545 - DNA, 212 bp, Homo sapiens
agatgggttcattgaaccaagctgggacattctcttaaacaaatcgtggccaaagggaagagggaacttaaattttacctttaaataaaagccagaacacggcgacaccgttcatgacacactcgaccactaaggcggcatcttataattttcttggtatggcgcttctcttcccctacaattcctgatgctgaaccagtggccccattctg

SEQ ID NO: 546 - DNA, 414 bp, Homo sapiens
  misc_feature (1)...(414): n = A,T,C or G
nnnnnnnnnnnnnnnnnnnnnnnnnnnnnnnnnnnnnagcacaaacacatttatttattaaccaagggggggatcctaattaatccaacacactttgaaatagctgcatgtaaaaggtttatgataaagataatggaacacagtatggaaaaaaaaaagaaagaaacagttgggggatttgctcattgaacggagctgggccattcttttaataaactccgggccaaagggaggagggaatttttattttactttttcatagatccgaggacgggggacatgggtcatgacacactccaccactaatttcccatttttcaattttttgggtatggggctttccttcccatcccactcctgatgctgaccaatgcaacatttggaaagtgggaaaaggtctgagttttttgccat

SEQ ID NO: 547 - DNA, 133 bp, Homo sapiens
tctggaatgtctgttcgcacacttgaccttcacagaacatttccaggtggagtgtgtctccttcgatccaatgggaacagactctgatctaactttttcccttgtggatacaggggagcctgccattgtccca

SEQ ID NO: 548 - DNA, 253 bp, Homo sapiens
  misc_feature (1)...(253): n = A,T,C or G
cctttttatatggcgaaccaccacccccatccccaaaggtgggggtcaaacccttttggcctcccttattttcttttacaaaagttgtttttttcccaccccattttggtgtgaaaccagttttgtctcctcccacgctaccaacaaacttacatgtttttatattggggggggtgtatatacacttctctccacctgaaacactaactcgcgggttttatatggtgcttaaagcccccgaaactactntctc

SEQ ID NO: 549 - DNA, 459 bp, Homo sapiens
caaggaatgatgcttttgatccacacactgggaagtagcagcgtggtaaatgtgtatgatccacactaatttagcgcagtgatgataaataatataaggatacgatgttgtggattatctcattgaacagagctagctcattctgttaattaactcctgtccagagtgatgatggaatctgtattctcctttctcatatattcgagtacgagtaacttgattggtggatcactccagcactgatttgccctgtattaatgatcttgttaagggctatccattccatgcgcacttgtgatgctgaaccattgcaccatctgtgaagcgcacgacaagctgagattgtctaccatgcactatagatagttctaacatgctgtgccagggtacaaataactgtggtgctatacaagtgctcgccaggattatggtgggagttaccatcacagccgatgatac

SEQ ID NO: 550 - DNA, 389 bp, Homo sapiens
  misc_feature (1)...(389): n = A,T,C or G
cccaaatatttttccatttgcagtttgctgaagctgtggatgcagaacccatgaatatggagggccaactgtattttgtaggcagttgaaaacattgccctggagctcaggagatggctctggctggagaattcatgccaagggagcctggcattttcgtccgtccacgctcctgaggtcctcctcaaactccactcccacatcaaactgcacagtgtagtttcggaaggtgctgagcgtcctcaccgtcatgtggttgccctggtgttcgatctccttgtccggttcagaagcagcggantcttccgcacagccaagctgatgtctgtnggggctgctaaggcctgcaggtagtccccatgtcttctgcgagacaagnggtatagcca

SEQ ID NO: 551 - DNA, 557 bp, Homo sapiens
tatttagttgctatactgtattgttttttatttgtatcattttgtattgttattttttatttttatttttcccaaatatttttccatttgcagtttgctgaagctgtggatgcagaacccatgaatatggagggccaactgtattttgtaggcagttgaaaacattgccctggagctcaggagatggctctggctggagaattcatgccaagggcagccctggcattttcgtccgtccacgctcctgaggtcctcctcaaactccactcccacatcaaactgcacagtgtagtttcggaaggtgctgagcgtcctcaccgtcatgtggttgccctggtgttcgatctccttgtccggcttcagcagcagcgcaatcttccgcacagccaagctgatgtttagggcttgcaggtagtcctccatgttcttctgcgagacaaagcggtagtagccagtgaggttgggaggcattgtgtggatgaaggtttcaggagaatgcaggagacagggtgaggaaggagggggtgttgtctggcaggtgaggctgagagattcca

SEQ ID NO: 552 - DNA, 613 bp, Homo sapiens
gccccaaagcctccctcctgctcaccgcggcgtggccgcgctcctgctcccgggtcatgtagggcatgctcagccagtaatggttctccgcctcgatctccaggcggcggatcatgttctgcttggcgcgcaacgacacgaaccgcggccgcaaatcttttttttttttttttttattttactttggagttttatttaaacaacctcagtagtttggatgacagcttgagaaagccttaagagtttgagactgagtttgatgatactttctcgtatgttcgtgtacagataacactgttcacagtactttccaccaccattttcccatccaccagctttctcgttatggtggtttctttgccatcccagtcctgaacttgaatcagggactccttatctaaggttactttactctttgttttgtggccacctggcgtgatttcctcaaactcttctcccagcttaaaggagatctcattatttttaaagatgcttttggtttttattgtgatgacatctccatctgtactgatggtcacagtggttttgccaaacggcccagtttcctgctggctcttcctatacccagctccctcatgagtctttcgaattt

SEQ ID NO: 553 - DNA, 663 bp, Homo sapiens
  misc_feature (1)...(663): n = A,T,C or G
gcgtcnacttttttttttttttttttttcatttggacaggtttattgaagctgagcagtttccccataatctagatgacttcaggttacacgctgtgtggctctctccagccacgagtcctcgtcgccaaatgggatagataaacgtctgttcagtctgcaatataatttggcataaagctgcagccacaagtgggctctgctgctggatgtggatcaggctctctggaatgtctgtttgcacacttgaccttcacagaacatttccaggtggagtttgtctccttcgatccaatgggtccagcctctgttcttcttttctcccttctggatacaggtgagcctgtcattgtcccagataaccaaactcttgcattttctgttgtccaggcctctgttatcttcatcaaattcttctccaactttaaatttcacaaagtagttccttaggctgctgttcgtgtggatggtaaaagaatccccattctgctcaatcactttctgtggcttcagcaacttggctattttacgagtggcaaagtcaatacctagggccagcatgtagccctcgaagttgtcgctgctgagcagggtccaagtaccgctgaggtcggcggacatggtcggggatcgcgggacaaacccggcgggcggccggaggctc

SEQ ID NO: 554 - DNA, 267 bp, Homo sapiens
kgaacgcgcggtgtctcggmgcctctrcgcgcrggaagatggcggaacargctaccaagtccgtgctgttygygbgtccvggtaacatttgtcgatcacccattkgagaagcagttttbmggvgactygataaccgrtcgaraacgatgtsagrggatcsgagggtagacagcgcggcaacttbcgggtattagataggsaaccccctggdctacccmvggccagagctgtcatdgcagaggcacggcattcccatcgaggcacgtt

SEQ ID NO: 555 - DNA, 465 bp, Homo sapiens
  misc_feature (1)...(465): n = A,T,C or G
ggcggcctnggcccggcagactgctnggctgatcgagggcgacaagggcttcgtgtggctggccatctgcagccagaaccaacccccctacgaggccatcccacagcagatcaacagcaccatcgtggacctgcggctcaacgagaaccgtatccgcagcgtgcagtacgcctcgctcagccgctttggcaacctcacgtacctcaacctcaccaagaacgagatcggctacatcgaggacggcgccttctcgggccagttcaacctgcaggtgctgcagctgggctacaaccggctgcgcaacctcacggagggcatgctgcgcggcctgggcaagctggagtacctgtacctgcaggccaacctcatcgaggtggttcatgggccagcagtttctgggganttttcccnacatcgttcaacattcgancttgttcatgnaacggatttcagcaagcttcaaca

SEQ ID NO: 556 - DNA, 225 bp, Homo sapiens
  misc_feature (1)...(225): n = A,T,C or G
ccgacgttgctggccacctgcagaggctcagcctgcacaacgatggggcccgtttggttgccctgaacagcctcaagaagctggcggcattgcgggagctggagctggtggcctgcgggctggagcgcatcccccatgcagtnttcagcctggntgcgctgcaggaacttnacctcaaggacaaccacctgcgctccatcgaggaaatcctcagcttccagcact

SEQ ID NO: 557 - DNA, 260 bp, Homo sapiens
  misc_feature (1)...(260): n = A,T,C or G
ctgctcggactgaccggaaaccacctgaaatgtctgcccaaggaaatagtgaaccagaccaagctgagggagatctacctgaagcgaaaccagtttgaagttttcccccaggagctctgtgttctctacaccctggaaatcattgacctggacgagaacaaaataggtgccatcccagaagagatcggacacctgacggggctncagaagttctatatggcttctaacaaccttcccgttctgcccgcgtccttgtgcca

SEQ ID NO: 558 - DNA, 255 bp, Homo sapiens
ggcacgagccctctgccctggaacgccatgagcctgcagatcctcaacacgcacatcactgaactcaatgagtccccgttcctcaatatctcagccctcatcgccctgaggattgagaagaatgagctgtcgcgcatcacgcctggggccttccgaaacctgggctcgctgcgctatctcagcctcgccaacaacaagctgcaggttctgcccatcggcctcttccagggcctggacagcctcgagtctctcctt

SEQ ID NO: 559 - DNA, 391 bp, Homo sapiens
gcccggattccagggctttatggcccaaatagaggaagggggggttattcagttttttgaaagcatttgcttggattcccccacttttgattttgtggtatttcccataaaaaaaagtgggctgggggggaaaaactggaagttttagtacttaatttccaccaggggaaagttcttctaccagaaaaggttttgaaaaagccccatttttaatttcttctatcaaattcccggcaaaaccgcgtctttctaagttagggctgtcggcaaaacctttggcacaccctttttaaattttggcgcatcccgcgcaaagaggggcctgtaccttgggtacgggcgctacagaactatggtcaactctttcagattgtacaggcccctaaaaaca

SEQ ID NO: 560 - DNA, 535 bp, Homo sapiens
ctggttagaatttaattgcacgcgtaaaaagatttaaagctgttattttgtccataatttcatatgctcctatcatagttagtgctcgaattagttgatctcttaaagcagcagcagttagtgataacttgttactttgtgttttccatataacaagtgcttggtgggctctctcacttaatgaaacagtgcatctctttcatctgccctctgtagatagcgtgcaatagtatacaactgttttcctttacagatttccactggaggtctcagcaaagggttgtcatcaaaatttatctccttcagtgaaaaaagattgtagatagcactaggtagagctgtcagattatttccactcaggtttagttgctgcagatcatttaaagatagcaaagatggtggaagataacttatttgattattgtatgcatgtaaactaaccaaatttctcaattctcctatatttcttggaatctctctgattgcattatttgagatatcaagttctttaagttgagtcatattagatagctct

SEQ ID NO: 561 - DNA, 259 bp, Homo sapiens
gtggctccagattgagcagcccctcgaagctgagggtccccagaggctggatgcggatgctatgcaaatgcaaaaccacaaggctggtgaaattctggaacgcgtacccggggatgtggctgatgcggttgagggccaggatcatggactgcaaggcagggaggttgttgagggccctgacagggatctcacgaagtgcattcgcgaccacccagaggtggcggagggaggacagccgattagagctgctcttcggcac

SEQ ID NO: 562 - DNA, 526 bp, Homo sapiens
gcgtcaggttggccaggccgcgcagcgcgcccggcacgcggcggaacaggttgtcgaaggcggcgagttcgcgcagggccggcagttcggccaggaggcgctcgggcacgctgaagaggcggcaggctgctaggtctaggcggcgcaggcggctgagcgccgcgaaggtgcgcgcgtgcaggtagcgcaggtcgccgttgtgcgccaggcgaagctcagccaggcgcggcaggcccttgaaggcgccgggcgtgatgaaggacaggttgttgtggcgcagcgacaggcggcgcaaggacggcagcgtgccgaaggctcgctcgcccaggaagcgcaggccgttccggtccaggtcgatggagaccgcctcgcacgggagctcggccggcacccgcaggaggcccgcgcggtcgcagcgcaccgagcagccgcgctccacggtgctgcaggcgcaggcggcgggacaagcgcgggcgcaggcccccacggcccaggcgctgggcaggccgaggaccaccgctccgcg

SEQ ID NO: 563 - DNA, 505 bp, Homo sapiens
gcggccgcagagccccggcgggcagccctgagctccccagctggttgtgctgcagcaacaaatagcgcagaccacgcgccccgtgcagccgagccgcctccacctgccggatgcggttgcggcccaggtgcaggatagccagggtccggggcaggccggcgggcactgtggtcagctggttgtgggagagatccaggtattcaaggctatgcagcttgctgaaggtggtggcatccaggccactgtctgtcagctggttgtgctggaggtagagctcacggagttgagtctggcggctcagggctcctcggggcaccttggagatgagattgttcttgttgtgagccacgcagaggtgctgcagctgggtgagggactcgaaggcctcgtcaggcaggccttcggaggagatgaggttgttgtggaggttgagggttcgcaggccactgaggcgggacagctcattgtaggggagttcctggagctggttgttctgcagggagag

SEQ ID NO: 564 - DNA, 585 bp, Homo sapiens
gataaaatctctgaacctttcactttctaaagacggtggcaagaaatttaagtatattgagaatttggaaaaatgtgttaaacttgaagtactgaatctcagctataatctaatagggaagattgaaaagttggacaagctgttaaaattacgtgaactcaacttatcatataacaaaatcagcaaaattgaaggcatagaaaatatgtgtaatctgcaaaagcttaaccttgcaggaaatgaaattgagcatattccagtatggttagggaagaagttaaaatctttgcgagtcctcaatttgaaaggcaacaagatatcatcgctccaagatataagcaagttgaaactgcttcaagatttgatttctctgatcctagttgaaaatccagttgtgacccttcctcattacctccagtttaccattttccacctccgttcattggaaagtttggaaggtcagccagtaaccactcaggatagacaggaggcttttgagagattcagtttagaagaggtagaaagactggaaagagacctagaaaaaaagatgatagaaactgaagagcttaagagcaaacaaac

SEQ ID NO: 565 - DNA, 476 bp, Homo sapiens
  misc_feature (1)...(476): n = A,T,C or G
ttttttttgaaaaaatacaattaaatttttattaaaaatacaaactccttacgggatctttgtgtacantttgtgtgaaaagggaaaaaaaatagggaaggcattaagactacccaattatttatactgtatttgggagaagcgtntttcagtcaaactttaacgnaaaataagntattctgttttcatttgctcccggacgtcagaaggcagagtttcaaacagngcatcttctacaactaaaccagctcgnttcagagcccgacagtcacccagttcaggnggggagggntttcaaagngattacccttttacatctaagggagggggaaggaantaggccaantttccccattttcngggggaaaggtacaggatggggctgttttttttccccatctttcaggggtttttaagggttccttgccggaggtgggggttcctctngggagggcttttcccccttttggttacct

SEQ ID NO: 566 - DNA, 140 bp, Homo sapiens
  misc_feature (1)...(140): n = A,T,C or G
tgcaggattcggcacgagatgaaatcaanactataaaaatagtaggaccagaagaaaatctangtcaagcggaagncagaaacatgggaatggtcttgnggcgacaggatnaaaagtgtgattattnctttagtgtggat

SEQ ID NO: 567 - DNA, 241 bp, Homo sapiens
gatctataaacgacactgcaatgggtcgggctcccttcgtaacaggaagtcctccatgcaaaagagcgagtctgccaggacgcgggaaactccatcctttctttggtgactcaagggagcaaaaaggcctaataaatgggcgcccgcctgcctgggggtgaactcccacgataccaagcgcgatgcccatggggaaggcctaaccgtcgtggggaggactaagagatcgctgtcgggcagc

SEQ ID NO: 568 - DNA, 226 bp, Homo sapiens
  misc_feature (1)...(226): n = A,T,C or G
ccaagttgttgggagccccttntggtattgggtgaagagggccggggtgcagagttgcccacccttttcttggggaggaaataacacaatnnttacggcagaagcggggaatcccttccttatagtccaaggctctgtgggtgaaggcgacctttagggtgaaaggggataatatcttgtggtgcccaaaaaacgggtgtttgtttggcgggatagagaccaaaaa

SEQ ID NO: 569 - DNA, 540 bp, Homo sapiens
ttttgggggttttaaatattttattcattataaaacatataggaccacaacccagaaaatgaggaaaagggatgagaagggacaggagaagcatcccagggaagcaacactgaccatgtgccgtgggacccagacccagctcttacttgtaggccacatcacacccactgttgttgtggacatgatgggcctgcagttcccgcagtctctggctgcagactgtctggtcgtgacactccagtccagggacatggtgtataacaaggacattcactggcgtggtcagctgaatactgcagccaacagcttctgccccccatgccttgcgagagaccgtggtggagacatctttttcagtgagctgggagatgttctcaaataggtactggagcccctctgatacctgtttagcttgtgttttgttccaggaggaatcaccccaggcctggatacccagagcagagaagacaagaagccacagcagcatccccacgtggtcccaggacaccaatctggagagtgtggatggcagcagatatc

SEQ ID NO: 570 - DNA, 256 bp, Homo sapiens
  misc_feature (1)...(256): n = A,T,C or G
ngaaagttcttaaanacaacctttncatncccgncaaggtacagcatcgaganagcactgagttcngtngggacacagcangccttaggaancttagagttaacagagttgaccaangtctgaacaanggcangattagnggagtncagangatcagccagaggaaaagggcattcnccgnggcagtaaaaggcgtaatacccccgggggancnanaacccaggncattccnacccccangtcnactggaangtcc

SEQ ID NO: 571 - DNA, 176 bp, Homo sapiens
gctgtgttgtacagggccaggaccttgctgtactgcgtgtccagtgcccaaatgtatttgtcagggctgctggcagtaatttggcatggtagccctctggtctgttgatccacttccagccgatgttctttcgtgaatgcattgtacattctccgctctcacagaagcttctccgt

SEQ ID NO: 572 - DNA, 153 bp, Homo sapiens
cttggggaagtccatgaggactcatacggctctcgatcactgttctgaatgtcgtttttgatgatgtcttgattatcacgcgatcataatatggacatggggcgcagtctggtgggcagtcaggaggatctgcggttggcaaaggggttatgg

SEQ ID NO: 573 - DNA, 276 bp, Homo sapiens
actcggtttagtttgtggatgatcggatgactacgtgtctgtttggtgtatttagtgtgtgtgtctggtgtgcataacggtcaatactcaaggactgcctgatcacagcggcagacaaatccctctactaccatctcattataattattcagtaacaccttaacatacgcatccatctacagcatgaacatgccactcagttcagtgggcacaccacaggcttgggagaaccgggaatagacagaattgaccaccgtctgcacaatcgcatgattg

SEQ ID NO: 574 - DNA, 247 bp, Homo sapiens
catacggagcactgatccattcattccagcctatgtacttgaaactgacacacatctgcttcttactgcagatgttggccttgccttacactccaagcgcctacgactgcggcgacaactggggcttcagactgccgcgcctgcagcatgaagaaagtctcttcgactgctcctttcctcatctgttgctgaccagcttcacctgcggcttcttttttccttcccctactctactatctcttcatct

SEQ ID NO: 575 - DNA, 163 bp, Homo sapiens
tgtatatactcatttccactttgccgccggatcccatccgcacttgtgacgtgagtattcgtactttatcggcctatacgatgtctctgtccgcgtcttcctctttctctttagcccacaccctccttatcacgtcctcatatcgtttcctcatctcttcgta

SEQ ID NO: 576 - DNA, 548 bp, Homo sapiens
  misc_feature (1)...(548): n = A,T,C or G
tttttttttatgccatcaacagtttattcttccgacacataaaaccacagcactctgacatgttcacagctacattctactcgagacttatgctaacaaatctgtccactgaaaactacactcgtggggagaaagagctctccaaatgagttacatttcacttggtttatggcaacgaccagagagtgtgccctttacacctacggacactgcactcgatgtgctcatccacacacacacttcccccgctcacacagtgtgcactgagcagcacggagagactggtcacaggaagctctctgcccaggcactctaaggcccacagcattgctctgccaggcaggcttgttgaagtggcccccatgctaacgacaggtgcacctcgtagctatcatgtcttcgtactctntgtaagcgatggagccgacgggttcaatggtcaacacactcagggggctgtactcgctccgcacacacgaaggccttggcactggaaggttcagcttctcataagatatactctggaccatggcgagcacaggagagcc

SEQ ID NO: 577 - DNA, 206 bp, Homo sapiens
  misc_feature (1)...(206): n = A,T,C or G
gcacttgcaggagcgcaccatcatgttggacagttgctccaccttgggcttgcggcccacgtaatacacgatgggtaggggctccagggcctgggggacgcagcacggagccgccaaggctctcggttaaattggngtttgtacagggccagacctttgctgtactgcgttgctcagggtcaaacgtagggggagggcgcgaggca

SEQ ID NO: 578 - DNA, 235 bp, Homo sapiens
gaaaccaatgcttgcgcaagagaacatttgcatcggcgctagcccgagccagtttcggatggaaaacatgcacgcgcaaatcaagacgagcctgcatcgcctgaagcccgacacggtggcagcggactgttgtgtgtccgccagctacacaaccatggttctcattcaaaaaacctacaccggggtgactctccaaacctatgacgacttgttagccaaagactgacactgcata

SEQ ID NO: 579 - DNA, 220 bp, Homo sapiens
gcgtgcgcgcaataggcacgattgtgcattctgtcccggtcgttgctgacgactgcacacggagcgaccgtcattggaagacctgagttgtgccgactggatgctggagggactggaggtgcacgcgaccatgtgaatgcctgcgtgccccagccaggtcagggaggaaaacatgcacccccagatcaggacgaccctgctcccactgaaactcgacgct

SEQ ID NO: 580 - DNA, 169 bp, Homo sapiens
ggttgagcgccggcggccccccggaccccgtcagcgcgacgggcagcgcgcactgaccttggtagtagttggccaggaagccgggcggcgcgatgacccactggtgccggtccacctcgtggaagctcacgtactgcctccgcgcgtgactagcgccctcggggccgcc

SEQ ID NO: 581 - DNA, 423 bp, Homo sapiens
ggcacgagcggcacgaggggcggttggctttctcctttcaagaacgagttattttcagctgctgactggagacggtgcacgtctggatacgagagcatttccactatgggactggatacaaacacacacccggcagacttcaagagtctcagactgaggagaaagcctttccttctgctgctactgctgctgccgctgcttttgaaagtccactcctttcatggtttttcctgccaaaccagaggcacctttgctgctgccgctgttctctttggtgtcattcagcggctggccagaggatgagactccccaaactcctcactttcttgctttggtacctggcttggctggacctggaattcatctgcactgtgttgggtgcccctgacttgggccagagaccccaggggaccaggccaggat

SEQ ID NO: 582 - DNA, 475 bp, Homo sapiens
gcggccgcagacggaggaggacggcgttggccgggacgcggacatcgcagggcagcggcgggggcgcgggccggggccacgggcgcaggggccggagccgctgcagccgcaagccgttgcacgtggacttcaaggagctcggctgggacgactggatcatcgcgccgctggactacgaggcgtaccactgcgagggcctttgcgacttccctttgcgttcgcacctcgagcccaccaaccatgccatcattcagacgctgctcaactccatggcaccagacgcggcgccggcctcctgctgtgtgccagcgcgcctcagccccatcagcatcctctacatcgacgccgccaacaacgttgtctacaagcaatacgaggacatggtggtggaggcctgcggctgcaggtagcgcgcgggccggggagggggcagccacgcgggccgaggatccccagctgatgagcagcagcgggc

SEQ ID NO: 583 - DNA, 163 bp, Homo sapiens
ggcagacacattcggaggccaccatgtaaggcacgtagatcacgctgattcactcctacgacatgctgatgagcagctagccctagtatgcagttggcacacaaaatggtgggctcttcgaggattatctactggatttcatagtaattatcagaaccacatg

SEQ ID NO: 584 - DNA, 510 bp, Homo sapiens
  misc_feature (1)...(510): n = A,T,C or G
aataaaagtccagctataaggaagcagtctgtgtagtgtgtgggtgagtggatgggaacgtgtgtgtgtggtgtatgtggtgtgtgtgtgtggngngtatatctgtctatcctcaaggactgcctgatctcagcggcacccacatccctctactaccatctcccgatcatttttcagtaccaccttatcatactcatccagctacagcatggacatggcactcacttcactgcccacacaacaggctttcgcgataccggaatccacagaactgaccagggtctgcacactgccatccctgcttcagccgaggtgctcaccccaccgaaaggagcagtccccatgacagtagaaggcctggtagcctgctggagccacaatccagtcattccagcccacatcgctgaagtccacatagagcgagtggcgcccgcagatcttattcctcttcccgcccccctcaagtgatgcttaggtctacgcttggccctccgncgtcccgccaaggca

SEQ ID NO: 585 - DNA, 363 bp, Homo sapiens
cgccctccggctcgccttctcctggagcaagtccctgttgctgctgtacatggaaatcacctgcggggggactttctcgggctcaggatagtcttctgggggactggcgagcttcagcttgctcaggatctgcccgcggatcgcctcgatcctcttgcgcatgaactggtccatatcgagtgtgctgcaggtagacaggctgtgcgcgaccgtgaccagatgcaggatcagaaaagcgctcagcacacagcaggcgctctttttaaacacctggatcaaaaagtcgtctcttatatgttcgactaaaagccagaactcaacacttctctaagtatagatcaaggagagtgggtcggctttttg

SEQ ID NO: 586 - DNA, 485 bp, Homo sapiens
gggagctctatggggtacaatggcggcatcaaattttgaggtgacgaccctctatatttccgctactaccctcagacatagcacatattagagttcaccatgctgactcagggcgtgtccattctctattccatcaacacgccattctgccatcgcaagcaacggttggatcatccgacgacagagattgtgagccgtgcgacaaagcgatatctgggccgccacgttgcggcgctggcgcgtgagctgtgcagtaacgacgagagcggcgaggatgtcgaggatccctaagtcggatacatcatccgccgacaccgtctgctccactaagcgggcgacgtgtccagaccacgccacaacccttctcatccagggttcgcacttggctgctggcagtggccaacgagacaagtccggaggaccctcatgatgctcctagctgaacgcctgttgccagtggattcgaccgtgattgaaacctgaat

SEQ ID NO: 587 - DNA, 404 bp, Homo sapiens
ggaagaggggttcacgtgagggggagatgagggaacaccagacgtagctaggtgggccagtgccaagagccggatgggaagcgtgggctgggaggggtgtggagaggggtgggacaaggggcagcctaggaggagcagagggggtcagcgtgtggtgtgtcgggggtagagaacgctgggcatgctgggcgcgcgggtggttgcagcacatgtggggcaccagggggcgcgcgtgacgggccagctttcgcgtcgacagcgcgctcaggatctctgtggtcgggtggtgcagacgggtccttgagcttggcaggtggcatggaggaggatagaggatggacacgccctgggagagcatggtgatctgtagtgtgtgctcggtcgtagaatagtcggagaagctg

SEQ ID NO: 588 - DNA, 343 bp, Homo sapiens
ggaaagttgctggagtttgtgacacgccgctgtaaatgaaggtaggatgaagaactacgaattgttgggcgaaggatttgaggacctcttgagcagcagcgccccccaagaatgcgtcaatggaatgtggctcagccgcgccacaactgcgaaattcggggacgagcatcagcctcaccataatcgataaaccagatacctgaaggatgccagtgagacaagaattcaacttaccaagaccaagctcagcgtgagagtgagagaccccgggagatctaccctgtaggatacgaaaactatcaacagcccgtaggcatcagtacaaagcgatcacattagctgc

SEQ ID NO: 589 - DNA, 397 bp, Homo sapiens
  misc_feature (1)...(397): n = A,T,C or G
gagtaataaaatctttattaggaaccaggtttaaaacaagggcaaaagcagtggcaagagggggttaagtagggggatgatgagggaacaccatacttggctagctgggccactggcagaacccaaatgggaaccctgggctggaagggtgtcgagagggctggacaaagggccaaactagaggagcagactgggtcancggaaggtggataccacatatggaacctcgacatcctcgtccatctcagcgttacagcacaggtcaagcaccagcgcgcccacgtggcggtccagatatcgcttacacacactgtcatcaactgtgtcatccggtgatcccaaccgtccttgagctgacaactggcatgagaaggaatagacatggacaccccctggg

SEQ ID NO: 590 - DNA, 551 bp, Homo sapiens
gaggtattaaccctttattacgattcaggtttccaaccagggaaaaggcccgggccaaaggggttcaagtagggggaatatgagggaacccccaacttggctagttgggcccctgcccaaaacccaatggaaacccccggcttaaaggggtgtggaaaggggtggcccaggggcccccctaaaggaccccacgcggtcatcggatggtgtatcggacatagggaacctcgacatcctctccggtcttcgtgttacagaacagtttaagcaccagcgcccgcacgtgggggccccaatttttgtttgacacacgggtcacaatctttgtcattggctgaccaacccctccttgagcttggcggcttgcttgaagaaggaatagagcatggacaccccctgggaccgcatggggaactctaatttgggccctggcttaaaaaaacccaggaacctgttgagggtcatctccccacattaggcttgaagccttgtcctcaaagcaaccccccatggcccctcttggtatagcctgggcgcggggccggcacggg

SEQ ID NO: 591 - DNA, 438 bp, Homo sapiens
  misc_feature (1)...(438): n = A,T,C or G
nnnnnnnnnnnnnnnnnnnnnnnnnnnnnnnnnnnnnnnnnnnnnnnnnnnnnnggggaattattaattctttattaggaatcaggtttcaaacaagggaaaaagccggggccaaaagggttcaagtagggggataaaaaaggaacccccaacctggcttgttggccccccccccaaaccccaatgggaaccccgggcctgaaagggtttggaaaaggggggaccaaggccccccccaaaggacccccccnggtccccggatggtgttccgacctagggaaccccgacatccccccccctcttcgtgttacagcacagataaaacccccacccccccacggtgcggcccagcttttgcgttgacccccgggtcacaaactctggcgacgggtgatccaaccgttccgtaagcttggcaccgggcaaaaggaacgaata

SEQ ID NO: 592 - DNA, 424 bp, Homo sapiens
gtttatggcagttgagaaaattaaagttagggtgttctgttttgagttgtagatgccaacaagattcagaagaactgttgaaactagcaacatctataagtgaaaccttggaagagaagcctgatgtaaatgctgacattgtgcattggctctcttggactgcccaaggctttttatctccacttgctgcagcagtaggaggtgttgccagccaagaagtattgaaagctgtaacaggaaaattttctcctttgtgccagtggttatatcttgaagcagcagatattgttgaatcactaggcaaacctgaatgtgaagaatttctcccacgaggagatagatatgatgccttaagagcttgcattggagacactttgtgtcagaaactgcaaaatttaaacatcttcttagtagggtgtggagc

SEQ ID NO: 593 - DNA, 247 bp, Homo sapiens
  misc_feature (1)...(247): n = A,T,C or G
gaagccaaatgggaaccctgggctggaaggggtntngaggggntncgacaagggnccaccctagaggngcagacggnttcagcagatgggntatcggacataggnaacctcgacatcctcgccggtctcgtcnttacagcacagctnaagcagcatcgcccgcacgtggcgtnccagctttcgcttcgacacacggctcanaatntctntcatcggctnatccaaccnttccttnagcttngcagct

SEQ ID NO: 594 - DNA, 206 bp, Homo sapiens
  misc_feature (1)...(206): n = A,T,C or G
antcaagatgtnccccattnactttgagaaggatnacgacagcaactntcatatggatnacatcgcggctgcatccaaccttcgngcaganaactatgacantncttctgcagaccggcacaagagcaagcngattncagggaagntcatnccagccatnnncacgaccacagcagccgtggttggccttntgtgtctggagctgt

SEQ ID NO: 595 - DNA, 217 bp, Homo sapiens
  misc_feature (1)...(217): n = A,T,C or G
catatccgggtgannagccacnananncgtgtgngtcctgacannnagngcatctatgatgacgatttnttccntcacctagatggngtggcattgcnctgnnacaangtggatgncgcatgtacatggaccgccgctgtgtctactaccggaagcnagtnctggantcncgcacacttggcacaaaggcaatgngcangtggggatcccttgcctg

SEQ ID NO: 596 - DNA, 219 bp, Homo sapiens
  misc_feature (1)...(219): n = A,T,C or G
aantggnaccccctggcntgaaaagggtgttgagaaagggttgacacaagggccncnccntagagagcacacagggtcnccgnatggtgtatcnnacatanggaaactcgacatcctcgccgctctcgtcgttacagcacagctcaagcaccagcgcccgcacntggcggcccncantttncgtttcgacacaggtctcanaatctntgtcanggtgat

SEQ ID NO: 597 - DNA, 367 bp, Homo sapiens
gaagccgcatggtaatcctgcgctagtagatgtgtggatactggtggaccatgggctagactagaggagcagacggcgtcatcggtatggtgtatcgcacataggagacctcgacatccacgccgcactcgtcgtaagcagtaggctcaagcaccagcgcgcgcacgtagcggcccagcgttcgcttcggcagacaggtcacaatgtctgtcatcggatgatgaaccgttcctagcgttgtgagctggcatgaagaaggagtacagcatggacaggccctgtggcaagatgatgatgtctaatgtgcgctacgtcttaggatactcgaaaaactgtttgatggtcatctcgtcaccattaggctgca

SEQ ID NO: 598 - DNA, 303 bp, Homo sapiens
aaactttccattctttatttccatcaggtccaaaatcaatttccaaacagtgtcctacatttttcccactgccatggggtcctgggcgttcgggcccccaattattacgcactcgcaccacgcacttatattcccttaccccaccataacggccccaaaaaagggcttccctttcgcgaattccaccatttcggggtgactgatgttgacctacacccttctcccccttcggagcttcaccaggccgccgaaccccaccctcttttaccaaaaaggcccgtacctttgtcttctgccgggtcc

SEQ ID NO: 599 - DNA, 337 bp, Homo sapiens
ttggttttttttgttttttataagaaaaagaaaaaaaaaaggccaaggcgtttttttttgttgtgccaccactaccccacaccactctccaccccaaccccgggggggcccgtgtgtgcacattttttttttgaacctaaaataaaataaaataaatttaaaaaaaccttattcagcagcagtggtaaggggcgcacccactgaactccaaggaaggtctaataatggttccggaaaggcaaaagtgtccaagggaggttggtgcaaagtgtgtcccctcggcccaggggcgtcaggcgctgggaggcaatggtacaaccttggtggaagctgagac

SEQ ID NO: 600 - DNA, 432 bp, Homo sapiens
  misc_feature (1)...(432): n = A,T,C or G
agacaccaacctcagagacaaaaattgtctacaacccgtggatggtaccatgtcccttgatatgaaagagcaccctgatgctgaggtacaaaagaaccaagtactaaccctggaagactggaaagagaagtgggtgacccgtcacatctcattccatcaggagcaagggcatcagctgttgaagaagcatttggatacatttcttaaaggccangagtggactgcgagtgtttttccccctctgtggaaaagcccgttgagantgaaaatggttcgcagatcggggccacactgtagttggtgtggaaatcagtgaaattgggattcgggaattttttgcagaacagaatctttcctacacagaagaaccgctcgccgaaattgctggagccaaagtatttaagagttcttcagggagcatttccttatact

SEQ ID NO: 601 - DNA, 199 bp, Homo sapiens
cagtaatggatccatcgcggaaggccgccctcccaatgaggatgttgaccacaaccgggtggccgtttacgaactgatgttgggtattgcgcaataccttgaccacctgatcctagttctccggtgagagcagcaagcgcccggcccccaaacccatgggtgccttgagataaagagagtaggccaggccacagggcac

SEQ ID NO: 602 - DNA, 229 bp, Homo sapiens
ggcacgacgtggccgagagaacgtggccgctgcgctcatgacccatgacgcgcgacacatgttcacgctgggcatgggccacattttctcgctgctggtgggctgtgacaaactgcgcatccgtctcatggacacacaccatgaggtgacgctcgcatctgatgctgatgctatggacctacagttcaggactgtaggcgcggcggaactgacagctgtccctgaccta

SEQ ID NO: 603 - DNA, 232 bp, Homo sapiens
cattttggttaaattcccggtgaaattcacaagcagctttttctaccgcttcctctggggtttcatgggggggaataaaaccattgtggtgagatcacctcgaataatctcttgtactactttccgtgtgaacttttctggggcacattggccaagtgttctgattgtccggccttttctcgaggcaaagtgcctgagaataaggttcaccgtgtgacaccgatcctggtgt

SEQ ID NO: 604 - DNA, 274 bp, Homo sapiens
tatcatcattaaattcttcagctgcggcgccggggtgctgaatcactccatttctttctcttggaacatcatcatcacaatctggactggcatcttggttcaatcccctgtcagattcagcagcagcttctcttacagcttcctctggagttccattggggggaataactccattgtggttagacccattggaattatccttgatatcatcttcgaggtatactttctggtgggccatgggcacaagttcttgaatgtacagccatttccgaac

SEQ ID NO: 605 - DNA, 483 bp, Homo sapiens
tggtgaattccattggcacaagttggaaaacaagaaggccacttggaccatggagaccaacccttggccggaaaagcccttggcccacaacgaagaccggatttttcattaagaaccgggggattggaaccaggcatgaaggggcaagacacctttttggagaagggaaccggattctgaccaggacccttaatggaactattaacaagccattccttggtatttctggaccgaacttcgctgtgatatacataagggaaggcgccttaacttaatggccacactctttgtgtctcttcagacactttgcggatgctcggctgcaacgtggtcacacatggtgcgcacgcccctgagattcacaaccatgctcgacacctcatatcacagagatagcccagatagcttgcgaaggctctgtgttgtgggcaatgtgaatagagcggatggcacagctgtaaccattcaccacacttttgtcaa

SEQ ID NO: 606 - DNA, 324 bp, Homo sapiens
tctgaaagtgcttaaggaaaaaaatgcgcagtaagtatatcgtcattgaggggctggaaggcgcaggcaaaactaccgcgcgtaatgtggtggttgagacgctcgagcaactgggtatccgcgacatggttttcactcgggaacctggcggtacgcaacttgccgaaaagttaagaagcctggtgctggatatcaaatcggtaggcgatgaagtcattaccgataaagccgaagttctgatgttttatgccgcgcgcgttcaactggtagaaacggtcatcaaaccagctctggcttaacggcacctggggtgattggcgatcg

SEQ ID NO: 607 - DNA, 546 bp, Homo sapiens
ccagggcatttccaactttttgcctatttttcacattttcttaggaaacattttctgtgaaattccaacacaagacacatgacttctaagtagtgctaagaaaactaagaggattagtttatacaactagacatttccaaaataagaaagttagcaagatattgaccaaactactcaagaaaggcagtgtaaaaatgtgtaggcactttctgtttcccctggagcaacttctagagtaccttgaacattctaggtgtttaatgaatgcctggtacactgttactctataataaaagtagattttagtctgaattctctagtagaatgaagggcctttcaggcaacatatttaatctctttatctaaaaagaaattctgactccaagctatcatttggaacttactgttacaaagtgttcccagggtatcataatcttccaaggagtcacagaccactcgccattgagaaagacagagtttgggcttatagagtggatcaaagtgcttctggatccatcaggtcatcgtgcagaacacagacttttt

SEQ ID NO: 608 - DNA, 634 bp, Homo sapiens
  misc_feature (1)...(634): n = A,T,C or G
actgattctgaccctcaccagtgaagagggtgtcagcatcacgcatacgctggacgggcagttcgacgaagccaataacgccgaaaaagcaatgaacaatctgaaggatggtctggcaaaactggggcaaaccctctattacgcccgcgatgtgcaaattaatttgccggggngctgtttgtaccaaacagtctgttaaaccagttccgccgtgaagctgctgacatgctggatgctgcgcgtcttgccagttaccagcgcggcancgtaaaccggttgctgatcctgcgccggtttatccgcaaacgcatctgagtttcctcgcgaacgtatacaaccagaaagcgcgtgaattttatcatcgctatggtgtgcagctgattgacgcggcgtatgaagcacatgaagagaagggcgaatccngctgatgatcaccaagcattgtctgcgctttgctttaatctgtgcccgaaacaggcgaaaaggcaatatcaaaagctggaangcgacgcaatgcaactggttaacggcgatgaagtttaacgctaaagttgattagctttttacgccacttacaaaatgtttgcaggaaaaccgcaacggctgtgatgcagcntggantggangctttccg

SEQ ID NO: 609 - DNA, 411 bp, Homo sapiens
gataaaatttgtatcgcaatctcattcgctggcggaggcgaaggaaatgtaaattttgttaattcggcgtgaagaattgatcctggacagcattttgctcaaaaaatagccatactatttaattgcaacaaggctgggaagaggaggatcgaagtatgttcgttgacagacagcgaatcgatctgctgaaccggttgatcgacgcacgcgttgacctcgccgcatacgtgcaactgaggaaggcaaaaggatacatgtccgtcagcgaaagcaatcatctacgagataatcttctttcccttcctggacgttgtactcccagcggcaggcgttggtgcaggtgccctggttcgggtcgcgcttgttgatatagccagagagcaggcagcgaccggagtaggccatgcacat

SEQ ID NO: 610 - DNA, 486 bp, Homo sapiens
  misc_feature (1)...(486): n = A,T,C or G
attcaatggtcgcgtccgtagcctggtgaatcgcgcggatctgatcaagattcagctctcgcgccaaccaatctgcgtgaagcaacatcagagaggaacttcgctttttcaactgtacgaatgtcgcactgctactggcgtgcagttcaatcggcggaatatcaagttccagaatccccatatcctgaacaatcagcgcatcgacaccggtctggtagaggtcagtaatcagccgttgcgcgggttccagctcatcatcatgcaaaatggtgttaagcgtgacgaaaatttttgcaccataacgatgggcaaacggcaccagctcggcaatatctttcaagctattactggcattatgacgggcaccaaaaccagggccgccgatataaacagcatcggcaccgtgcaaaattagcttcgcgtgcaatagcgggcatcggttnccgggctttanacagtttcaagtcgatgnaggaagatanggtt

SEQ ID NO: 611 - DNA, 208 bp, Homo sapiens
  misc_feature (1)...(208): n = A,T,C or G
aganttangangagagatagcaggacctccanacacaccatntganggnggaagataccanctagaganaaaaatatcagnnncanancccttnantncccctanngaccnnngnntcnctatagtatggcatncnaatattagtnncgtcanagggntnantngtttagatatgctgcntgatcanngggcagntgcantgactgtt

SEQ ID NO: 612 - DNA, 224 bp, Homo sapiens
agaggagcgacttgatatcatgaaggatctaataactggtccagcggcaccccttatgcaaatcgctgctttgagtttcatgtgtattttcctcaagattatcccagttcaccccctattgtagaatctagagacaactggtggtaatagcgtgcgattcaatccaaacatttataatgatggcaaggtttagtttaagatattaaacaagtggcatggaagac

SEQ ID NO: 613 - DNA, 435 bp, Homo sapiens
cacaatcagtagcgtaaatattgacatcttacctgcaaacatttttgggaatagaaggcagctgtttctttggcatagttcatcaaagactggtttttgcatcccctgccaatgttttcagcttcagatcgtttccatgtagagcttgtagacatgctccagaaagagtacataatgtgtactccaaacaaagaaattcagtagtatgtcatcagactcttccgtcctcagcattcaatttaccagccttccgggcattgtgcctcacctctgtgccttcaatgtagagttcccagctgcctatcacctttgtggcccagcggatctctggccacagtgccagtcctgcccctgcttgctccctgccctgtcctggcttacttcttttcttttctgagacaggatctcaactgtgtcaccaggctggagtgcaga

SEQ ID NO: 614 - DNA, 199 bp, Homo sapiens
ccatggttcgcccaaggtgaagtgtgagacaatggtctatcacctgggcattgacctctagggcaacgtatgcgtcaacatcgtcatagattactggatgccaggtcttacgataaactcgataatcgatggcctgcagtatctcttcctggagcttaatcgcgaggatcgacggtataaggatgacgctgaagtcctg

SEQ ID NO: 615 - DNA, 259 bp, Homo sapiens
tactcagaagggattctggtgcagtctctacatcccatgattttggagacaaggccactattagggcattcctatcaaagcccataggccctaggctttctatttttttagctggatctggactagaaacctggtgctccgcatacacattgtgcctaagtcgagccgactgtttggacatttcgggattttgtttgtacagttttgctacaacagcatgctgtcgaacatactggcgctgcgctgccagtagtggctg

SEQ ID NO: 616 - DNA, 157 bp, Homo sapiens
  misc_feature (1)...(157): n = A,T,C or G
gcagactggtcctgacatcatacagggcagaccactttctcttcaggatgtccaggcatatcttacactccgtgtccacgttggggtgatcgcagggctngaggaactccactgtgggaccattgtaagggcacgcactggggctctctagcgagag

SEQ ID NO: 617 - DNA, 363 bp, Homo sapiens
  misc_feature (1)...(363): n = A,T,C or G
ggcaagaggcggatggactctgacgggtcaagctcatcgagagtaatcatgtgggtactattctgtgaggactttatgtatttgtagtgaagtattacggaccacatggtacaccatatgaatgcggtgtactgaaagctagagtgttcctacctcgatttataccctttctaatctccttctatagggattcctgaatatagattgtccattccaatatatgagtaagtgtcagtaaatgtgtggcgtgaggtggtgaaacatacttggacagcacacgatgatcgtaccaanttactngtagccttcctngctcagnnantgtgctatccgaaccccanagatccgctaatggtgatgctg

SEQ ID NO: 618 - DNA, 184 bp, Homo sapiens
tgttaaacgtttaatgacacaagcggcacaattgacacatccaacacatcattaccatgcgcaggttctacagcataagctcttcgaatggcacttcacggtcccagggcccccacactccgattttgacgcaggagtttatcacgggcggatagtactgccaccacagtactccatgaaaccc

SEQ ID NO: 619 - DNA, 139 bp, Homo sapiens
cctcccgggccccctggccaagaggtccagtggaggaagcttcagtgccactggccagcgtcaaaagggcttaggccctgcgcctgggcgcgtcgggaccaccgtggatttcttttagaagagggagcccaggcgaata

SEQ ID NO: 620 - DNA, 256 bp, Homo sapiens
gctcctggctggagacctgcttcgagtgggcgtcctgcaggttcttcttaaaagctgcggcgttctttcagagctcggaagcatgtgtgataaagggactatcaatgatgggctctcctacaacgctctggatggagagcagaaagagcctggcataatacacggcacaacacttttgcttcaagatgcacacacatatggaacacatggagagcacgttgccgtgatagcagaggcgcaggcactttactgtggg

SEQ ID NO: 621 - DNA, 145 bp, Homo sapiens
tgtagtcacccactttattccggaggttcgccttgtcccgcaaaagatgttctgcagtttcaaaattaagtggcccttcaaaattcaaaagatttgtaaacaaagggtttaatccccaaacgacatcctttaatgttcttgtggg

SEQ ID NO: 622 - DNA, 169 bp, Homo sapiens
gtcggtgatcggcctatgcatactcacccaggagagtaaagcatggaggaaagaccacccattagtgttcgaggatgtcccagcaaagaataccgatggcactatgaacctcatgacctgggagtgcgccattacacgaaagaaagggactccgagggaaggaggcttg

SEQ ID NO: 623 - DNA, 316 bp, Homo sapiens
tctggacgatcttgagaagaagacgtccccatacctgcaggacctgtccagcgatgatgtcaatgtcctggtgtggaaagctcttgttctacctgatcaacctcactatcaccttaaagccttcaatctgtgcattagattaccggcggagtatctggtgaagcctgccctgatctaatttgcaaccaatatctatcacctctacgtggactagaacggacagatttggctgcccatcatacacagtgagaactggaagccttgctccaagagttgccaagtgctggaggccttcaatgtgctggtgattaaacca

SEQ ID NO: 624 - DNA, 304 bp, Homo sapiens
gtttgtgatcgccctgaacagactatcccaggagaggaatgcatgggggaaagaccacccattaggctttgaggatggcccaacccaaaattcggatggaacgacgaacctgatgaactgctagtgcgccattccatgaaagaaaggcacttcgtgagacggaagcttgtttaaactaccgatgctttacaaagatgattatccatcttttgcaacaaaatgttaattccaaccaccattatttgaccctgatgtttaccctgtcctgacagagatgctgttcatcttacaggaggacacggac

SEQ ID NO: 625 - DNA, 160 bp, Homo sapiens
tgccttctgcttgaacgctctggattgatagcacaatggtcctgtcatcatacagggcagaccacttttccttcatgatgaactggcctatggttccctgtgtgggcacgttggggtgatagccttgtgtgaggaactttactgtagggccattgtaagg

SEQ ID NO: 626 - DNA, 136 bp, Homo sapiens
caggtcgtttttccctatatttatttgtaaactcttcatcattcttacagtaatcttcacggtccttacagtattcttgagctcagttagcccgaagcgggtgctcaggctggtggtcatataccattgctatgag

SEQ ID NO: 627 - DNA, 223 bp, Homo sapiens
gctttttcgaggaaaaaattttttctcgggcttaatcatgcccaaagggatccccgggaaaaaagccaatggcaaaggggcttcttatttaggggtggccaaacaaacaagcagggccccccttaacactggcaacaacttgtctttaaaaaggccagaatatcttttcaaacacgccccggcccccttgggtcagggggctggggggaaaaattggaaaaaa

SEQ ID NO: 628 - DNA, 549 bp, Homo sapiens
tttctagtgaatctcattttattttcagtttaaaaaatatacgtagataagcattaaaattgaattattacaggttttctgaaattaaaattgtaccttacataatgtttaacaaagattaaaaatttcaaacaaatcaagaaggcacaggtcttgaaaaatgtagtaaagaatttactccataccttgatacatagtggtgacattaaatggcatgattttctgtatcatgcctgcctgccttagatctcaaaaagatgtactctcttttctttctttcttgccttaacaacttttgataatcaagcaacatattatgacaaagagagtaacaattgccattcagtccagcacatccatagagcagtactggaaccaggtgagactgttggtaggtggctccattgtggtgcatgacaaactcaatccaggagagtttttggtccaatggctctcagagactgatcataataaatgattgataactacataacattttttttacagctaaaggaaaatcaaatagacatcagcttatataatgaacca

SEQ ID NO: 629 - DNA, 157 bp, Homo sapiens
gatccggatgacgcatcagatactcgacccaccacacagccaactcgagtggcggcacaggattatctcggaagcgtttcgagcgcagtctcatcgcttttgagtaacgttcgtcctcggccacctcgcgtatggcggataccaaactgtcggtggt

SEQ ID NO: 630 - DNA, 463 bp, Homo sapiens
  misc_feature (1)...(463): n = A,T,C or G
agatcaacctttncttctgtaaggttttgcacaactgactccagagaaaacacaacaacaccatcctcatcagagctctggacaaattcttccatttcctacagaggaaaaactttcttcattataaagatgcaatgccacatagaataatatagtttatgtatacttctaaaataaaattttgaagttgacatatatatagttatatcatccctattttctgaggtgcattttagaatagaaatgttcaagtttgtgttagaaacatatggcttcagtacataataattatttactagaaaaagcacacaaccaaataattatnaagaacatttaagtgagaaatgtgcagctcatttaatatttaatagacatcaaattctaaaaacataatggtttgcaaactcataaaactatttcaacaatatcaagtgtcaatttgctgggcattntgtgatngtca

SEQ ID NO: 631 - DNA, 1056 bp, Homo sapiens
ttttttttttttttgggagggtggggagagataacgctgtaaacttttatttttcaggaaatctggaaacctacagtctccatgcctgctcagccaagaaggagctcactgtgggcaccagagacagggacccaatgtggaaaggatgatttttggccatttttcctactcttcaagaaaacaggagataactagaatgactagagaatggggctgccagaactagtgggaagctccctagaaatggtgacatcgcccaccaaacagaccccgccaaggctgcacctggccttatgtctccttcacctttctggccccacgcagccaccagacagccatgcccagcagcttcccacaaagccatagagtccccagagtgagccccagcagaaacacaaaaacgtcgagcaggtactgctcatgccagggctgctgaaagacatagggcttgaggtgcgtcgcgccccctgtctggaggacgtggtcaatccagcccaccagccgctgtgtggggctgagcgggtgggagcgcaggatgacactggcagccactgccgcggactttatctcttgtctccatgattgtttatcttagagccatgttctgcctgagctctttactgatagaacaccaacttttggctctactcgagacagatcacacatagcccttgctgtggcaacaaggaagacaagagacttgaaagaatctgctagcagccaggactagtaggatgattgagcaaaatagcaagtggcttgggcgattcttgcctgagggcaaatcccttattgagcgaaaaaatcgatcattctactggtcctggtgaatgtatcgttacatccaaaaatacacccgaagcaaaggaaggctggtgcctagatactaatatttatgggtgctcctgccgttctgggaaactggccgctataaaaaagaacccgggggagggtggattgggcttcctccttcctacttcccgggtgggggggggggattcaaaaggaagttacaaaaggaaatcgaaaaagtaaaagcaaaacccacaaaaccgc

SEQ ID NO: 632 - DNA, 199 bp, Homo sapiens
caccaccgtccacgacagactggtcatctgagggcccgtgctggacaaagctaccagggagtggggctttgtacacaccattgactcaaccggtgtgggctatgcagagacacgctcatgtgcagaaggcacggtcgacatctgtggctgtagcagccgaccaccaggctcaccatacaagggcctgaagtggggtggc

SEQ ID NO: 633 - DNA, 583 bp, Homo sapiens
ggtagaaggtggtaaaaacagagttgccactctcggtgtggccacgtgagcacgtcccacttaagtaacagggtgtccctcaggtcagcttgtgataaaacccaagtcaaacaaggctgaatcctgggtgttttatgtcctaaggatctgaaaagtgttcacggccagccctgaccctcaagacctcaaatggtcatctaagcagtaacgtaaattggtgtgtaaacttgctcctgggccattgctgtggaagtgggactggcgaaagtacagccttgccatgcaggaactaatgtctttctaggcatttaaaataaggggaaatgtgttgattactccgacaggcaacccaactgcagtggctaaatgcccaaggctgacaaattctgcatcttatcactcccgtcaagtggcatgtgaatactgtcagcccaaaagaattgagaaacaacttgccttccaaaactctgcatctcagcaaaatcttgacaatgccaacagctcgtcatctcgtgtttttcaaccctttagaaaatggccttacagcctgggacaaaccgaagcactgtccagaccgagaaca

SEQ ID NO: 634 - DNA, 292 bp, Homo sapiens
ccccattagtgctcttaagctcatccagaaagcccaggggatgcaaatacataaaccaaaccttgggccggccctgaaggccctagaggtagctttgacgattcacaggaatctcccctggcaaaagaacggcctgatttatttgaatctgtccaggcaaaccaggcgagaagagggccctggcaggcaaaaggacataatcaggcccggggaactgccccaagagccctgttacatggaaccgagagagcatctcctaggacggtacctggatccgcacacgatctgcatc

SEQ ID NO: 635 - DNA, 447 bp, Homo sapiens
ttaaatgcaaagaaaatgtatatattaaactttcacaaaatgagattcacaccccttctcgggaatacaagcattcatcacctagataaggccacctcatctttgctcgtcattaccaacaaggcccatccattcttttgtgttttaaccagaacattcatggcccagcaggtgctgcttcagttcctgacatggtttctcaatgaacagcgtcagggccagcccagtgacgaaggtcagcacacggtgtccagagaaaagatagaacatgttggtgtcagtgtggtgaataagtgtttcctgaaggccattgtaaaggatgatcagaatcggatgcaccaagtagcgagcataactgatgctggacaggaaactccagatgtcccaagaaagcacacggttcaccagacctccatggctaacaccctcgtgaatcttccatcacct

SEQ ID NO: 636 - DNA, 690 bp, Homo sapiens
  misc_feature (1)...(690): n = A,T,C or G
tcnnntagccngggaacgngaggnaccagggagacagggggaagtgtcttggcgacagggggncacagaagttgtggccacatggnnccccagggcacgacgnagggacgacggnaaannggttgttatctccagcctggggcttccgggcctttntngagacccctgtggnggntcagtacgtgagatngccccccacgagttgccacacggtctgaactctgcgctttgagatactggcctgantcntgaacgggtgcgtcaatcccctgggcctgaagaataacagcatccctgacaagcagatcacngccaccagcagctacaagnnctnnagggtcgaatctctncagcatggaccccctcctatgaacnggttcagataagnagcncacctnncannncctggggtnaggggaggagctacggcaaacgctcagtggnttggagatgtgacctngnntcctcgaagggtgggngganagncatcatcncccnggggggncngganatntgtctctnccccaggggggcgggatccttcaaagtttgcctncagggggtgaanncnngaacttcgggttgactncccaggaccccngggntntggagtagntancncttcccccggaanttgggaaaaccctccnncacgaggacttngttgagccnccccccnnnttcntttcn

SEQ ID NO: 637 - DNA, 489 bp, Homo sapiens
aatttttttccctaatagaaaaaaaagggaaaagggggaaaaccggtaacatttaaccccgcgcaaaacacattgcccattctaaaggggtggggggcttaaagagtctcttcccggggttttggaagggtcaattctaggaaatatcccagccaaagagtccccggcgaagggcaatactttgattccctgttttaggaaggacccggataaccccggaaatgattgggggggggaaaaagttcttcacctgcccttggggattagaatttccttcaaaaatcttggccaccaggggggatttcagcctggaggggttccattccactccctgcccactgggggggaggggatagctctttacatacatttcaaaggacagagacttgccgccctgtgtataattgctggttcttcttgagcttgagaagacaaattctagccactgttattgttgtttgccttggttgccagcataccacggccctg

SEQ ID NO: 638 - DNA, 600 bp, Homo sapiens
  misc_feature (1)...(600): n = A,T,C or G
ggtattacagtacacgggggtataactgacagtgattaccggggagagttaaaggtcattttatacaataccactccagattcttttgctataaaactgcagataccagttgctcaattgttagtggtaccttgtcagcaattaaccctgtaggaaatctctgccccaacagaggctacatacagaaccaggttattcagatccactggtactagtggcttaaatcctggagccaaaatataggtacagcgtccatcagatcccacccctcaggctggtgaccttgtagctatgggagcagaaaatgaaggcatagtacaatttcctaaatatgaaaaaacaatatcatgttcccctccacttttgctattacagggaatgacctatctaaagatgtgtcttgtgtctttgtgtctgaggcctagaatgaatttattacctggtagccactgctgcaaaagagctcaaccgcagtcagtgctggtatgtgtcgagttgccagnactgcagggaatggattaccttagaatattatctctgctaatatttccaagtggctatgtcgctaccaatggggttgggagaatagcactgtagtac

SEQ ID NO: 639 - DNA, 365 bp, Homo sapiens
ggaatgactttttgtattccgttcttggcatatatttggtttctttccagtggaaccaaaacctcctagaaactcatttcggtgtcatacaaagcatgaacttcttctatttctgtgtaaaaaatccgttcgcagatgagctgtgcaatgttgatcacctttttcgacttcaaacttctctttgcgaagattaaacagtacaacaccaacattttctctataatcttcatctatgagaccagctaccaccatcaataaagtgtttcgtagccaggactgaccgctggagccactcttccataatctgccagaagggagcggcgtatctgaatgtctcgcttttcacaacagcatttctcgatagg

SEQ ID NO: 640 - DNA, 279 bp, Homo sapiens
ccgagcgcgccgcgctagcgaactgtacagtggatataattacacaatagcacctatcgagaaagctgatgtgatgacggacattcagatagcgctccctactgggtggtatggtagactggctccacggacaggcttgggtgtcacacactttcatagtgtaggagatggtgtcatacataacgatatgaagcaatgttagtgttgtactgtgtaataccaggcaagacagtttgcagtcataaacgccataggattgcagagctcatctgcgacacg

SEQ ID NO: 641 - DNA, 968 bp, Homo sapiens
  misc_feature (1)...(968): n = A,T,C or G
attccagacattcctttattaccacttgttctatgtgtaggtgtttctgtctttgcacttaaggaagcagaatagcttctggagcaattaaatgaaattctgaatatagtcaaatctctggcttattcctggtaaatctaggacccaaattgtcctgttttatggtctcatggtcttgacccactcccaagggttgaaatcacagtagcatggtttttggtctacaccacaagttcttgggaatgagcgactaaaacccttgttgaaaaaagcagtggtctgtcagttctcagaggagaaaaatgaaggatccgggctctgaagatgattctgctcctcttccctctccttcccaacccaggtgatcatggtaacaggagatcatcccattacagctaaggccattgccaagggtgtgggcatcatctcagaaggcactgagacggcagaggaagtcgctgcccggcttaagatccctatcagcaaggtcgatgccaggtgagatcactaaagaatcaagatctgncatgttccctccatccccaggctgcccacccagatgcacttttactaaagtcttgggagtttctttcaatagggtaggattgtgtnggggtttacaattacaaaggtnaaacattantaggnaaattaaggtgattttntcaagggggtttttcaaaggggaggaaannttaaggaaagggggttaaaggggagggggggggtgggaaaaaatttttgggggngggantngggtttttcnaaatcctttggggttttcccggacaccccccnnnnnnnnnnnnnnnnnnnnnnnnnnnnnnnnnnnnnnnnnnnnnnnncnnccnnnnnnnnnnnnnnnnnnnncnncncncaaannnnnntnnnncncngtnnnnnnnnnnaaaaannnnncnnncccngnntnnttcnncaaaannnnnnnnnccccnctnccncncncg

SEQ ID NO: 642 - DNA, 476 bp, Homo sapiens
  misc_feature (1)...(476): n = A,T,C or G
attcggaacgaggagcaggttgcgccccagcagcttctcggccggctccgcgcggtacttcacgcctttcagcgccagganattcagcgcgacgatgatcagcgcgttgaagatcaccgccgacagattgccgacgtcgggctgtgcagccccatcacgttcagcgcgccgagtgccggatacgtcgcgacgaacgcggccgggatgatcgcgaaatacttcgcgagatcgttcgcgacgctgaacgtggtcagcgcgccggtgcaatggatcatctgcttgccgacctcgaccacctgcatcagcttcgtcgggttgctgtcgaggtcgaccatgttggccgcttcctttcgccgcctgcgttgccgttgttgcattcgcgaacggccaagtggnccttgcgcgaagcccgggcgcattcgtttnggtgcccttcggcccttnattggngaagagattggncttttgnttgggtg

SEQ ID NO: 643 - DNA, 210 bp, Homo sapiens
tgcagactgaaatctggtttgttgtgagtgtaccagtattgtctgagcagataacagaagtactaccaagggttttcacagcgcgttggcttctgaacatggcattgttctgtgccatgctgctagttcctggagcctggcaggtggtgctcactgcaggcagaccttcagttctggctgctacagcctgcgccactgcaattttatagt

SEQ ID NO: 644 - DNA, 810 bp, Homo sapiens
  misc_feature (1)...(810): n = A,T,C or G
cgaagtatttcgcacatcgttggcaatgctgaaggtggtcagcgagccacgggtcatcagcatctgtttgccaatgtgcaccacctcgttcaacttggtcgggttagagtcgagatcgaccatattgcccgcctctttcgccgcctggntgccggagttcatcgccaccgcgacatctgcctgcgccangccggagcatcgttggtgccgtcgncggtcatcgctaccaaacgaccttccgcctgatactgacggatcaatgccagnttggcctccggtgtcgcttcgncgagaaaatcatcgacacccgnttacgnagcaatcgaggcggcagtcagacggttatcgncggtaatcatcaccgttttaatggccattttgcgcaattngggcgaaggctctttnatancgtctttgacggtatncttttaagnggaataacgnncagcanacgnggacctttcaacnanaacnanngngtgtnggttncntnacgggnaacctggatcgatttttttgattaaacnatttggaagggangttnccaacngttangccttaanaatggnganganttggtaatngtcnaggancntttaanggntaattggggttgttgntgttnatccnnttnatntngttttnnngaagnaanngggaanaaagggtgtaattgganggntttaaangttggnttnnnaannttaaaattnntgnttgnggtgntnaaaatnttaggnttnngtgngntnatatgtaannnanattttttnngggtnaantntntnttnnnnatttnctattggggtt

SEQ ID NO: 645 - DNA, 387 bp, Homo sapiens
cggccccagtcttaaaccggggcagggcccacccacgcgcgcacgtacacacacccaggcttcaaatcttgttgaaagccgcgaaaccgacaccctgcacgtgccccccaaacttggggatcccccccccaagcaagtctgtccccacctggtcgtcccccaccaaaaactgaatctggagcttccggaaaccgtagcccaggggcaccagcttggaagccccccaaaaaagcccgtccagctgggaagagcgccaacaggcctccagctgagccatgtccggttaataatcccaaggcttaaaatccagcaggatggaggaattggccaccagtgaagggtttcttggcctttttctcccgaggaatgccgtagaccctccccccg

SEQ ID NO: 646 - DNA, 221 bp, Homo sapiens
gccagactcagtcttcaatcgtcacagagctctcgacagagcgcacgtacacacactcaaacttcagatctagttaagaactaagatatcggcactctactcgtaatcctacaacttaatggtataatcctcaagacagtctgtcaccatcttatcatcatcaaccacacactgcatatgtcacttcaggattccatagcccacgggctacaacttgaaag

SEQ ID NO: 647 - DNA, 404 bp, Homo sapiens
  misc_feature (1)...(404): n = A,T,C or G
tctcagtttttaatagtggcagggctccacacacttgcacacgtgcgcatgccaaccaaccaacactctaaggcttcagaccttgttgaaagctgcaacatcgacactctacacacgctctcaaacttggtaatctcctctcccagaaagtttgtccccaccttgtcgtcccccaccacacactgaatctgcagcttccggataccgtagcccatgggacccagctttggaggcccccctagaccagcccgtccaacttggatgaagcgaatacaggcctccaattggggctatattggnctcattgtcccaaggctttgatgtncagcgggatgggaggnctttgaccaccacgcagtcttcttnggccttcttnttccacataccaccttaggccatttttt

SEQ ID NO: 648 - DNA, 172 bp, Homo sapiens
cagcatccacttcattgatcatatcctgcaattcaacttctgttgcgttctgacccaatgaccttatgacagctccaagttcctttgttgtgatggcgccatcgccatctctatcaactagcgagaatgcttccttgaattcagctatctgttcttctgtctcctcatcagc

SEQ ID NO: 649 - DNA, 412 bp, Homo sapiens
ctcgacagcccgcggcgccccagccataccagccagcggcacagaggtcacagcggcccccaaccactccacgcttgcacaggcactgaccaccatcagggatgcactcccaacccagtgaaccccgaggggcgccctgacacggccaggcccccccggagatgagggcggacaggcccgcgaggacgggtgcccacgccccacacggcgaagtctagctgcgccccagacccctcccacggcatcggcagcgctcaaacgaggccccgccctccagggcagcagcatcacccccaccaaaccaccccagccacacgacaccgcgcaccacccccacccagccaccgagcagcccagcgccacaataaggaggctcaacgctggcactccacccctgcccgaccaacgtcag

SEQ ID NO: 650 - DNA, 331 bp, Homo sapiens
cgcaggccccgtgcgggcgactgctcacgaagccgcctttgcacacacagcggaaggagccgctggtgttcacacagcgctagctcttgcacagcagcccgcgctggttcagctctcgacactcgtcgatatacacgcatcgtgcgcggtacgcatcgagctcgaagccatcgggacactcacacacggcgccgcccggccgcagcacgcagcggtcactcacgcagcgacactggactgaatcctactctgaactgtcctcatatcttgctggcatcctcatcagcatggcgactgagtaccagaaggaactgctctcgctgttcgaaga

SEQ ID NO: 651 - DNA, 398 bp, Homo sapiens
  misc_feature (1)...(398): n = A,T,C or G
gagaatcagtgctgtgtgtggatacaggtgcaagctggcccaggagaatggctggggggtcatggtgagtcatcgctcaggagagactgaggacacattcattgctgacctggtggtggggctgtgcacaggccaggtgagtgaggcagcctggtgagtgaagagaactctctntgggattggtatttctagctcacccacctggtctctccttccaggtgtttgagggtgtcaggggagtttcaggagagcagaagtttcctttcaggggtgagagggcagtcactgagctgcaaatcctttgaaatgtttcanatcaagactggtgccccgtgccgttctgaacgtttggctaaatacaacccagctcatgagaatttgaggaagagcttggggat

SEQ ID NO: 652 - DNA, 226 bp, Homo sapiens
ggcacgagcccctcagagttctacaggtctggcaagtatgacctggacttcaagtctccggatgaccccagcaggtacatcacgcccgaccagctggctgatctgtacaagtccttcgtccagaactacccagtggtgtccatcgagatccctttgaccaggacgactggggcgcctggcagaagttcacggctagtgcgggcatccaggtggtgggcgatgacct

SEQ ID NO: 653 - DNA, 820 bp, Homo sapiens
  misc_feature (1)...(820): n = A,T,C or G
gnctncnnnnnnnnnnnnnttnnnctttcaagtcnatngtgattctcaggaggtntatgtcnttggtcaanantcnagntcggcacggggtancagacttgnnctgcccagtgcacagncccacaagcatgncagcnatgatggtntctncaacntcccccanangatgagacancntcangccccacgccngttgaagcttgcncagttcgnacgnctgatgagactcggtcacggngccactctggttgactnngnncagaaggangttgcagttntcctccngcacgggctngnggntcctctntgtctcgccacacttngacatcatctccnacnacntgnattngtncantcnntgcaaccttctggcaanctccccagtcatcntnnagcaacggggtctccgnaagacaacactnggtccgccttgtttgtaagacatttgnagagactcancccaggntgggcaaggantacctntacctntntngggtcatcatccaggattgtanggnccaggnctatncttctccagggccctgatngagctcggngggtccgttncgnccanttcnaanggacccacccngnttaattttcgcccannttccccantggcaggtttccaccaaggttnnaggnccccctccntttcttcaaggtttttttggttggaaaanccantnccattncccntnnattgggggggaggttntnccctaattnttccttaaannncaancttccccnntnggngggnanccnnttnnccnannncaattngttcccccnanntttgggtngaaccttttntncc

SEQ ID NO: 654 - DNA, 313 bp, Homo sapiens
  misc_feature (1)...(313): n = A,T,C or G
gggagtcatcaaggacaaatacggcaaggatgccaccaatgtsggggwtgaagktsgctttkccccaatatcctggagaacagtkaakccttggagctggtgwakgaagccatygacawggcttgytacacggataagatcgttattsgcatggatgtkgckgtctcagagttttatcgtgatkgcaaatatgacttggacttcaagknctcccactgagtcctgtcccgagtacatcacgtggggaccagactgggggmacktcgtaccagggacgtgtgtcagkgcacgtagtccgtggtgggtcgtccat

SEQ ID NO: 655 - DNA, 331 bp, Homo sapiens
  misc_feature (1)...(331): n = A,T,C or G
ntggcaccagngtttatttcaggaagcaggncnggaanacctgggtctgtccantggagtccnggagccnccagcttcncacttggccttcgggtnanggnacttgcgtccagcaaanattgccttgtccccaagagccnccncgatccncangagtnggntgtatttggccanacgcnccgagcggcagggggcgccantcttganctgtcctgtgcagagccccaccanaangncagcaatgaatgtgnccncagnctccccaagagcggggggtcaccattnaccccccangccatttagaactgggccanttttgcaangccctgga

SEQ ID NO: 656 - DNA, 232 bp, Homo sapiens
  misc_feature (1)...(232): n = A,T,C or G
gtntcttcagatntnctgttcccagtggtgcngcnacgggtatccatgangccctagaggtccggnacanttatnagnntcgngaganggtgaagggngtctcaaaggcnggtngagcacatcantaaaacgtatggngcctgcccttgggtatcaagaaactgnacngncanagnncangagaagatnnacaaactgatgnagccgagagggattnnaacangaagntaaa

SEQ ID NO: 657 - DNA, 311 bp, Homo sapiens
  misc_feature (1)...(311): n = A,T,C or G
ccgatgnccccagnangnacatntcgnctgnncaantggnctgacctgnacaagtncttnatcaaaggctacncaagnggtggtctatngannatncctttgnccaaggatgactggggancttggcaananttcacnaccantncaagaatccaggtaattggngattatctcacaattnccnacccaaaagaggatcnccaaggccngtgancgngnaatcctgcaacttnctcctgctcaaaagncaaccagatttggctncctnaccnaagtctcttcangccntncaaacctggcccanggncaat

SEQ ID NO: 658 - DNA, 374 bp, Homo sapiens
  misc_feature (1)...(374): n = A,T,C or G
ggaagggtgtctcaaaggctgttgagcacatcaataaaactattgcgcctgccctggttagcaagaaactgaacgtcacagaacaagagaagattgacaaactgatgatcgaagatgggatggaccagaaaataaatctaagtttggtgcgaacgccattctgggggtgtcccttgcccgtcntgcaaagctggtgccggttgagaaggggggtccccctgtacccgccacattcggctgactttggctggccaactcctgaaagtccatcctngcaagtccccggcgttcaatggtcaatcaaatggccgggtcttcaatgcttgggcaacaaagnttggcccatgnaggaagtttcatgntcctccccagtt

SEQ ID NO: 659 - DNA, 327 bp, Homo sapiens
  misc_feature (1)...(327): n = A,T,C or G
gnctccngatnacccnncanngtaantntcggcttgancaggttgcgtgnccntgnncnaggtcnttcatcaaggantacccaggtggtgtctancgaagatccctttnaccaggatnnctngggagcnttnnnnaagttnacanncagtgnnggaatcnagggagtnggggangatntcncagtgaccagccngagaaggnttgcnaaagccnttaangagaagncctncnactgcctnctggtnnaggtnaccagnttnggtccgtgaccgagtctnttcangcgtncaanctngcccagcaaatggttngnccgncatggtgtc

SEQ ID NO: 660 - DNA, 503 bp, Homo sapiens
  misc_feature (1)...(503): n = A,T,C or G
ggaagctgggatctgtcnananggagtccnggagccnccancttctcantnggccttcanggttacngaacttgcgtnnacaaagantgagttgtcccnaagagcctcctcgatcatcatgannnggnnntannnngccagacgctccgancggnagggnncgccagtntnnatcngnccngtgnagagcagcaccacaaggtnagnaatgaanntgtcntcantctccccagagcggtggntcacnatcagagcccagcnattagantganccagtttgnacgnctggatccgantcngtcacagagccgatctggttgaacttcagnagcagacagttgcaggccttcnnntcangggcctnggnaatnctcttgnggttggtactgtcaagtnantgnnnacaatcnggatgntcacccgcgagagaaannaggtaaaaggggccanntaagctggtgnaaggggtaaccatngagacaanaggntgagtcttgntnaag

SEQ ID NO: 661 - DNA, 276 bp, Homo sapiens
  misc_feature (1)...(276): n = A,T,C or G
ntggcatggatcttgactctcgcgggaatcccactgttgaggttgatctcttcacctcaaaaggtctcttcacagcagctntgaagagaccttttgaggtgaagagancactcaaaaggtcntctttcagagctntgtcccaagtggtgcnttcaactggtatcctatgaggccctagagctcccgggacaattggtaanactcgntannattggggaaagggtttctncaaaggcctgttgngcnncatcaataaaactattgggcctgncctgg

SEQ ID NO: 662 - DNA, 212 bp, Homo sapiens
  misc_feature (1)...(212): n = A,T,C or G
tctcgngggactanaactgttgnggttgctctcntaaactanaacggtctcttnngngctgctgtgaaaagtggtgcttnaactgntctctctgcggaactcgngctangggaaactgctacgactcgctctctggggaagggtgtctacacggctgttgcgaaactaactaaaactcttgngactgnactgnttcgaacganactgaacgt

SEQ ID NO: 663 - DNA, 485 bp, Homo sapiens
  misc_feature (1)...(485): n = A,T,C or G
gagatntcgcggcnttangntcacttngtntttngaagaaccttcggttcntntccttagcgacgagacccagtggctagaagttcaccatgtctattctcaagatcatgccagggagatctttgactntcgcgggaatccactgttgaggttgatcncttcaccncaaaggtctcttcagagctgctgtgccagtggtgcttcaactggtanctatgaggccctagagctcgggacaatgataagactcgctatatggggaagggtgtctcaaaggctgttgagcacatccattaaaactattgcgcctgcctggttagcaagaaactgaacgtcacagaacaagagaagattgacaaactgatgatcgagatggatggacagaaaataaatctaagtttggtgccgacgccattcctgggggtgtccttgccgtctgcaaanttggtgccgttgagaaggggtcccctgtaccgccacatgct

SEQ ID NO: 664 - DNA, 342 bp, Homo sapiens
  misc_feature (1)...(342): n = A,T,C or G
ccagcttntcanttggccttcgggttanggnnnttgngtccagaaagattgccttgnccccaagagcctcctcgatcctcatgnnttggttgtatttggccanacgctccgngcggnagggggcgccantnttgatntgtncngngcagaccccaccanaaggtcagcaatgaatgtgtcctcagtntccccagngcggtggctcancatnaccccccagccattagnctgggccagtttgcacgcntggatcgattcggtnacngngccgntntggttgncctttnagnngcatanagtttgcaggcctttttctaaanggcctggggaatcntnttgggg

SEQ ID NO: 665 - DNA, 288 bp, Homo sapiens
  misc_feature (1)...(288): n = A,T,C or G
gngtgatgaangtggattacaancnaananttctggagaacaatgancgnnctggagctgntgaacanncgncatgnangcngatggttanncaganaaggcggngatcggcatggatgtngnagcatctgagttntatcgaaatnngaagtacgatcttgacttcacgtcgaatgatgatnacgcacngcatattactggngagangctcggagngtgttactaagagctttattaagaactatnnngnngtnttcatcgaaganngntttgaananggatgaatgg

SEQ ID NO: 666 - DNA, 339 bp, Homo sapiens
  misc_feature (1)...(339): n = A,T,C or G
ttggaccagtgtttatttcaggaancaggtctggaanactggagtctgtcccagnggagtcctgnagcctccagcttntcacttggccttcgggttanggaattgcgtccagcaaanattgncttgtccccaagagcctcctcgannctcatgagttgggtgtanttggccagacgctccgancggcaagggggcccnantcttnatctgtccctgngcaaaancccaccacaaggtcagcaatgaatgggncctcagnntccccanancgggggctcaancatcaccccccagncattaagactggagccanttttgcangnctgggattcgantcgg

SEQ ID NO: 667 - DNA, 418 bp, Homo sapiens
  misc_feature (1)...(418): n = A,T,C or G
ccattctgggggtgtnccttgccgtctgcaaactggtgccgttnagaagggngnccccctgtancgncacatngctganttggcngnnaactctgaagtcatcctgcnagtccnggcgttcaatgtcatcaatggcgnntctcatgcnggcaanaagctggccntncagnagttnatgatcntnccantnnntgcagcaancttcagggaagncatnctcattnnagcanaggtntaccacaacntgagaatgtcatcnagganaaatatgggananttgcccaccaatgtnggggataaaggcgggtttctcccaaacatccctggggantanagnanggcctgangtgnttaaagacngcgaattggnaangcncggtacncttaanaanggtgggttnancggnatggaacgtag

SEQ ID NO: 668 - DNA, 338 bp, Homo sapiens
  misc_feature (1)...(338): n = A,T,C or G
tccangcgnccncgttacncagacaaggtngtnatcggcatgnatgtggtagcatcngngttctatcgcaatggnaagtacgatcntgacttcaagtcgacngatgattccgcacggnacatcactggnnagaagctcggagagtgtactaagagctttatcaagaactatnntgtggtcatcatcgnagacncctttgaccaggatgantgcnncacttggaccgtccntaccgtctcgggggtgaacagccatattgtnggggatnacttcanagtnnncaacnccnaagaaggattgcccaggntggtngagaagaatggcctgnaacntgtntg

SEQ ID NO: 669 - DNA, 278 bp, Homo sapiens
caaaaatcctttgaccaggatgactgacgaaattggcagaagtccacagccagtgcatgaatacaagtactgagggataatgtcaaagtgatcaacccacagaggatagcaaaggccgttaacgagaagtcctgcaactgcctcatgatcgaaatcagccagattggcaccgtgacacgagtctcttcaacgcagtgcaagatggatcaggccaatggtcaggggcgtcatggtgtctcatcattccgaggacaatgtagataacttaatctctgacc

SEQ ID NO: 670 - DNA, 164 bp, Homo sapiens
tgggaagtacgatcttgacttcaagtcgcctgatgatctcgcagggcacatcattgggcacaagctcggggactgttataagatgcttatggaggactatcctgtggtctgcatctgggaaacctttgaccatgatgacttggacagcttgaagtcctttctct

SEQ ID NO: 671 - DNA, 443 bp, Homo sapiens
taaagagcatggatttatccataccatgtgacatgaatgaaatgaggagttttcagggctgccaacctcttggttaaggttctgtgtagtatatttctcctacgatgtgaaaagcaaaacaccccttgtcctcactaggaggaatctttgccatatttctgcctgatgacatccttctggtaaagcacggctttcctgaggttacggttctagcagggagaaccatgaactcctgcactgccggcccattaccactgtgaaaactaccatggaccttgctgaaagctggcattggctagatacttttggattgccagccaggacccattgtgacagtataggtggctccttgcagcagcttcaacatcacagacagcaagcagcacttctagtaaggtctttgcacccaatttagatgtgttcccagttagatttaaattcat

SEQ ID NO: 672 - DNA, 782 bp, Homo sapiens
tttcatgggtcactgaggcttatgattatgcggacaaaaccaccggggatatagcctgtggcaaccccggagatgacacgatgctcagatgactctagacacttggtggaaagtgaggggagaataagaatgactttggccaattacacgactgctgagctagagctgccaacagggctccagggagtttggcttctgtatacgttctaaggaaacggtaagaactccatggcggtggcgcgataactagcagggatactgcaagtgttggtcggagggctagagctgcctaagcttacacgaggtgaggggtctgtgtagagaacagatgaccgaaggcttagctgaccacagcttacttggtcaggggtttcttaagttctgtcggcaaacttagccatgcggcccagctcctcttcaattctgaggagctgggtgtacttgaacaagagctcagatcggtaagaggcaccactctttatctaagcagtgcacagacccggtaccaggtcagcgatgaacctatttcactcgtcaccgacgatgagacacatgatgctcaatgcattgcctcgacagctagcacgcgtgaatagactctgtcacgagccaatctagttgactgtgagtacgatgcagttatgggacttctcgatcacggccaattgaaatacttctttaggttgatcatttggcaagtcatccccactccatgggatgcatggactgacatgagaactgctggccacctccccagatcatcctggtccaagaggattttc

SEQ ID NO: 673 - DNA, 159 bp, Homo sapiens
cgcctaaacgcgactcggtcaaggagccaatctggctgaagttgagcccgaggcagttgcaggacttcacgttcacggccttggggatgcgcattgggatggtcactgtgaaatcatcccccactacgtgggttgactgcactggctgttaacttctgc

SEQ ID NO: 674 - DNA, 476 bp, Homo sapiens
atcgggtcactggggattttaattttgagcacaaaaccaccggggatctagcatgtgccaccccggagatgacacgaggcatcacatgactctagacacttggtggaaagagaggcgagaaaaagaatgacttgggccaattacacgactgcaaagctagagctgccaacagggctccagggagcttggcttctgtagaagttcaaaggaagcggtactaactccacggcggtggggcgctaacaagcagggaccccagcaagtgttggtcgggggcctcgagctgcctgagctgacacgaggggaggggtctgtttagccaacaggtgaccgaaggctatgcatgcccacagcttacatggccaaggggtttctgaagtacctgccggcaaacatagccatgctgcccagctcgtcttcaattatgaggagctggttgtagttggcgaagcgctcagatcggcaaggggcaccag

SEQ ID NO: 675 - DNA, 351 bp, Homo sapiens
  misc_feature (1)...(351): n = A,T,C or G
gcccacattttacttgcccaaagggctttttataatcctcccggataactttatcttggtggccacactcctattcaattctgagagctgcttagatcttgccaagcgctcagattgccaggggcaccangcttgatctgtctaaggcacaggcccacaaccaggttagcgaggatggtatcttggtgtgcccacaacgatgaaaaaacatgacggcccaaccattgggctgggccacatagcactcctgaagagacttgagcacggatccattatggtttactctgatcaagacggacatacactactattcttctacagccctggcgatgctgtactggtaggtcactg

SEQ ID NO: 676 - DNA, 580 bp, Homo sapiens
  misc_feature (1)...(580): n = A,T,C or G
nnnnnnnnnnnnnnnnnnnnnnnnnnnnnnnnnnnnnnnnnnnnnnnnnnnnnnnnnnnnnnnnnnnnnnnnnnnccaaggggccccgggggcttttttttttgaccccaaaccccccggggatttaccctggggcccccccggaaaaaacccggggctcacataactttaaacccttgggggaaagggggggaaaaaaaacaatgcctgggcccaattcccccactgcaaagttaaagctcccaacagggccccagggagcttggtttttgaaaaaatttaaaggaagcggcccaaaccccacggggggggggccctaactaacagggccccctgaaagggttggtgggggcccccaacctccctaacctaacccaagggggggggtttgtgtacccaacagggaaccaaagggtttgcctccccacattttacttggccaaggggtttttgaagttcctgccggaaaaattagccttgctgcccacctccttttcaattttaaggagctggttgacttggccacccctcaaatcgaaaggggcacagttttgctcgccagggcaagccccccaaccag

SEQ ID NO: 677 - DNA, 573 bp, Homo sapiens
  misc_feature (1)...(573): n = A,T,C or G
nnnnnnnnnnnnnnnnnnnnnnnnnnnnnnnnnnnnnnnnnnnnnnnnnnnnnnnnnnnnnnnnnncccaggggccacgggggctttttattttgaccccaaaacccccggggatctaccctggggcccccccggaaataacccgaggctcacatgactttaaacccttgggggaaagggggggaaaaaaaacaaggactgggcccaattcccccacggcaaagctagagctgccaacagggccccagggagctgggcttttgaaaaaattctaaggaagcgggccaaaccccacggggggggggccctaactaacagggacccctgcaagggttggtcggggccctcaacctccctgacctaacccaagggggggggtttgggtacccaacaggggaccaaagggcttgcctgcccacagtttacttggccaaggggtttttgaagttcctgccggaaaactaacccttgctgcccacctcctnttaaattttgaggagctggggtgcctgggccaagcgctcaaatcgggaaggggccaccattttgatcgtgccagtgcacagccccaca

SEQ ID NO: 678 - DNA, 201 bp, Homo sapiens
tttttttcatcaagaaggcactggtttaagaaggactcaagaagatacaaagaaatgccaagatctttgcctcaaagaaactctcagagcctcatagatacccgtggaagccccactgggcacagctgctcggaatcggcctctcaaagggctgaggtgtcctctctgagctcagggacaggaggcagtgcagagagagac

SEQ ID NO: 679 - DNA, 281 bp, Homo sapiens
  misc_feature (1)...(281): n = A,T,C or G
acagtcaccaaccccaagaggaccgcccaggccggacgagcaagaaggcctgncaacagactgctgccgaaggtcaaccagaccggctcggtgaccgnatcganccaggcgtgcaaacaggctcaggntaaaggcntgggggagnnggncgagccaccgctcnggggagacagaggacacattcanngcagacctcagnggaggggcactgcacaggacagatcaagantggcgccccctgccgcgcggagcgccnggccaaaaacaaccaacgcatgagg

SEQ ID NO: 680 - DNA, 483 bp, Homo sapiens
ggcgcacgcaggcttcttattttgagcacaaaaccaccgatgatctagcctgtggccaccccggagaagacacgaggctaacatgacgctagacactaggaggaaagagaggagagaaaaacaaagacttggcccaagtacacaactgcaaagcgagagcggccagcagggctccagggagcttggcttctgtagaaattctaaggaagcggtacgaactccacggcggaggggcgctaactagcagggacccctgcaagtgtgggtcggaggcctcgagctgactgagctgacacgaggggaggggaacgtgtacccaacaggagaccagaaggctggcctgcccacagcttacttggccaaggggcttttgaagttgctgccggcaaacttagactcgctgcccagctcctcttcaatactgacgagctggttgtactcggccaagcgctcagatcagcaaggggcaccagtcttgatctg

SEQ ID NO: 681 - DNA, 623 bp, Homo sapiens
  misc_feature (1)...(623): n = A,T,C or G
gcgatgacagtttccagtaaactccgcggcctgctgatgcagcagctgagaggtaccagccagctgtacttcaacatcagccttcgatctctgagctcctctgcacaagaggcctccaagagagcccccgaggaagtctcagaccacaactatgagtctattcaagtcacaagtgcccagaagcatgttctccacgtgcagctaaaccggccagagaagaggaatgccatgaacagggctttctggagggagttggtggaatgcttccaaaagatatccaaagactcggactgccgggctgttgtagtctccggtgcaggaaagatgttcacttcaggtattgacctcatggacatggcctccgaactcatgcagccctcaggagatgatgcggcccgcatagcctggtacctccgtgacctcatcagcaagtaccagaagaccttcactgtcattgagaagtgccccaagccagtgattgctgccattcacggaggctgcattggcggaggtgtggacctcngtttctgcctgtgacattccgctactgcactcaggatgcttttttcccagatcaaggaggtagataatgggcttggctgctgatgtaggaacactgcaga

SEQ ID NO: 682 - DNA, 409 bp, Homo sapiens
cagacatggtcttagcagctagtcgtttgccagaagtaattgcagcgtccgctgtgtatgctagtgtcggttgcgcgtcagcttttactcctgatccgaggggttccaccagctgctggaccactcccattgtgcttgcgctgtctgcacgactgcttcgaccaggcaccgtcatgtcgagagcatgaggcacacccaccattgtgtgcagcctttgtgttgctctctcgcctgcgaagtcctccacgaagacttgagttgtagctaacactgttttcctgtcttttgttggtattctctagtggcacgaaatgggagcctcaagttcgcgtcccacgcatgatccattgatgcgcagccagataggctttgtggagcgtttcaagttgcaaactcgtctccgtgcttc

SEQ ID NO: 683 - DNA, 274 bp, Homo sapiens
cttctaataggaagtcgattgtccgtccctctggaagtacgtgttcgggaatccagggcttcaccagttgggcaaccaatctcattttctttgccctgtctgcacgaatgcctctaccagtcagtatcatgtacaaagcagtatgcacactcaacattttggcgcagctttgtgtgcctcctgctcctgagtaagcccccatcaaaaactcaagcgtacctaattctgattgtctggattggtgcgtttctcgactggcatgatatgggcaccc

SEQ ID NO: 684 - DNA, 314 bp, Homo sapiens
gcatacaagtggattttagaggcttttaggatccggaaaggaatctcttaattgggggttttacaagccatcgggtatttaaactaaggtcttatgtggtcatgaataaagggtgcaatgaaatagtagctatgatcataacccccttgcaatcgaaaaacaacgggggttttcttttctggacaggcagctatgaggttatcggggggtaactgtccatctaaaagaaactggtcctctttcccctgatcaattaatatgtccagctgggatcctgggtaagatttcacaaggtgggtagcatcataagcctt

SEQ ID NO: 685 - DNA, 383 bp, Homo sapiens
cgattcagctgcaggagcatgatcttctgcgaggaagtcagcactcctgttgattcccttccggcctcctgatgagattctcttggctgaggcttttcatgcattcaggtacttagcatggtgtctgatgtggtcagcgatgaaagttgcaatgaagtagtagctatgatcataaccctcttgtagtctaaacacaacagggattttcttctctgtgcaggcagctatgaagttatcagggagtaactgcccatttgaaagaaactcgtcatcttttccttgatccgattaggatgtcaatctgggaaccccgaataggccttcacgagacaggtcgcatcgtatgccttccatttactttcatctggtccccaaaatatcca

SEQ ID NO: 686 - DNA, 394 bp, Homo sapiens
caacctaatatggtgatgtcatcgattcggacatcaggcgtggtggctaaatttgaagcccagccagatgttgattatcgcggtgatatccacttctttaatcatgcgattcccaacactttttattcaatcggtgtgactttagcagccggggatgctaacgcttggttcaagtctgtctttggacaagatatcccatttgcggaatgggtaaatgctgcagcagagtcatcagttggggcgaacgggttgatctttacgcttatatttctggtgaacggacgcttatccagatgctgatattcgtggtagctttacgggcattgatcgacccatcaacgcgccgactttattcgcgccgtgttggaagggattattttcagctttaaaggca

SEQ ID NO: 687 - DNA, 163 bp, Homo sapiens
gcatcaagtgcttgggtctgatcatcaccctagcccccttgaaggaggacttgtagcccccagggtgggccccccttacaccaggccaggtaccccagaaaaaccccttacgggcacccccgtatttttggtgataataatgggccattaagtttggccaaag

SEQ ID NO: 688 - DNA, 209 bp, Homo sapiens
ccccctggggagcaaaaatttcttggtctcaacttattttccatgaagggaccccaaaactcgaaaccctctcacaggtaccaactcactcccttatggtcaactgtgtcacccgaaacacctatgaaggtgggtaaaaggcaattccttaaccaccaacccccttcgtagaaaaaagcacagaagaagaaaaactgtttgggtcccga

SEQ ID NO: 689 - DNA, 163 bp, Homo sapiens
aatctgctggtcggatcatcatggatgctgccttgagcgaatagcctgagcctgtccagtagtaccatataatgccgatgaacttatatgtgtactgcctatgtagatagtacatatcgcactaataggaatgaccacatgcatcagaccaccatccttctgt

SEQ ID NO: 690 - DNA, 411 bp, Homo sapiens
aacagtccggtccctgatggggggctcttcccctggcccttcccaagtctggtaaaagctaagtcggtggcccaatttgaagaagttcaacttggaaaacaagggtggaacggcttgaaacctttggggaagttcccggttttcaatacccaagttcgaatgggttaacaagctggggatttcccccttaaaaattcccaagaggccctggttccaagccttgatgacctggcctgttcccaaggggaaaacaaaaggctggttctcggggaggcttctttgaaaaactggcccaaatttcaaatttccccggtaaagtaattgtgagggaaacccctttggccgatttaattggaaaattgtcccacggtttttggaaccgatatgtaagcttcctttgccctgggcccc

SEQ ID NO: 691 - DNA, 815 bp, Homo sapiens
  misc_feature (1)...(815): n = A,T,C or G
cccccccccccccccctttttnnnagacggccatgcaagctacctcactaaggatagcttgcccgaatgcttttttttttttttttttttttttttttttttttttttttttttttttttttttttttttttttttttttttggggaccaagtaaaaaaatttttttaaccccttgaatttcccagttgcctcttcctttaaaaaagaaaaaagttctaactagttgtgtaaatttcttcaaggccaagttttttcattgttgctaatatccttagggcggaagccctgctttttcaatcaatatcccctaattccccttcaaaagggaattttgcatttgggggaattttggcaccaggctgtcctttttttccggaagcccattttggttaaatccccaggggggccttttctcctttactcatagtaaagagggcttcaccccaccccctgaaaactttgcctaccccgcccttaaaaattaaaggcttgggatttttcttcttctttgcacttgtttgaaaattagaatcaaaaaacagtcccaccttgtggtgttcctgtataccagcagggaacaacacccccctttttgggaaagtgggttttatctcccttttcagaaaagatttagtatattttggggggcccccaccccgggtcccttcagaacgggtttttttggggtaaccttcaaaaagcgcacattttttacttgccagacatttacctttactttcgtaaccccaaaacgcttggtttcaaaaggagggttatgggcgtcaaccacggggtccttgttagctgtctggcc

SEQ ID NO: 692 - DNA, 450 bp, Homo sapiens
  misc_feature (1)...(450): n = A,T,C or G
nnnnnnnnnnnnnnnnnnnnnnnnnnnnnnnnnnnnnnggaaaaatctggtccctgatggggggctctccccccgcccctccccaatctggttaaagaacagttcgtcggtctatttttaggaggtccacctcgaaaaacaaggttggacgcccggaaaatttttgggaggtcccgctctccatacactagctcggatgggatgaaaagcttgtgttttttcccctcacaaatacccagcagcccctggtcccagcccttgatgacctggcctgtgcaagggagaagacaaagggctggttctggggcaggctggtgtcaaactctgtcccatcttccagcttccccgtgtagtgcatgtgtaggacatacccttttcgcgatttgatgggacagtggtcacacgcttcttgaaaccgatctgcagcttcctttttgcctcggccccgtg

SEQ ID NO: 693 - DNA, 459 bp, Homo sapiens
tgtttgttttttggaacacagctggaacctgatgggggcctttccccctgcccctccccaggactggttacatgctcatgtcgacgcatgtattatgagcatctacacctcgaacaccatggttgcaccgtctggaatcttggggggagctccacactctccataccctatctaggaagggatcaccagcttgcgcttatcccccttacacatccccagcagcccgtggtcccagaccttgatgacctcgcctgtgccaagggagaagacaaaaggctggttctgctgcaggctgctgtcaaactctgtcccatattacagcttccccgtgtagagcatgtgcaagacataccctttgcgcgatttgaaggtacagcaggccacccgcttgttgaccccaatctgcaggttccttttgcccttagcccacagtgccgtggtcacggtgcttatgcagat

SEQ ID NO: 694 - DNA, 360 bp, Homo sapiens
  misc_feature (1)...(360): n = A,T,C or G
ggggcatttgaactgagcccaaaagtttgaataaaatttctatcactagaagctgggcacaggctcaggaggaagacatcgcaggaagagggaactgtgtgagggagacatggaggccagagtactgctgacttagagggggaagaaactgatagcattaagcaggatactgagcaagcttcacccaccttctttgtcccttcttacagatattacattgtggggcatggagctgggccttctgagcatgcagagaggagagctngccaggttcctgttcaaaccgaactacgcctatggaacgctgggctcccctcccttgatccccccaaacaccactgtcctgttcaagattgaact

SEQ ID NO: 695 - DNA, 459 bp, Homo sapiens
  misc_feature (1)...(459): n = A,T,C or G
tccaagtggagaccctggtggagcccccagaaccatgtgccgagcccgctgcttttggagacacgcttcacatacactacacgggaagcttggtagatggacgtattattgacacctccctgaccagagaccctctggttatagaacttggccaaaagcaggtgattccaggtctggagcagagtcttctcgacatgtgtgtgggagagaagcgaagggcaatcattccttctcacttggcctatggaaaacggggatttccaccatctgtccccagatgggagtntcactcttgttgccccaggctggagtgcaatagtgcaaatcttcactcancacaacctcccgccacccggggttcaagcaaattctcctggtcctccaggcctccccggaggttagctgggggatttacaagggcattgngcccaaccaacngatccggggcttaaanttttt

SEQ ID NO: 696 - DNA, 363 bp, Homo sapiens
  misc_feature (1)...(363): n = A,T,C or G
cgaaaccgaaagtcccgtccggaccctccaagtggagaccctggtggagcccccagaaccatgtgccgagcccgctgcttttggagacacgcttcacatacactacacgggaagcttggtagatggacgtattattgacacctccctgaccagagaccctctggttatagaacttggccaaaagcaggtgattccaggtctggagcagagtcttctcgacatgtgtntgggagagaagcgaagggcaatcattccttctcacttggnctatggaaaaagggggatttncancatctgttcccagggacttaaagacaaacctgatgaggccaactgggatggacctccagcagccagtaaatt

SEQ ID NO: 697 - DNA, 672 bp, Homo sapiens
  misc_feature (1)...(672): n = A,T,C or G
tttttttttgagacagagtctcgctctgtcacccaggctggagtgcagtggcacgatctcggctcactgcaagctccgcctcccgggttcacgtcattttcctgcctcagcctctccgagtagctgggactacaggcgcccccaccacgcccggctaatttttttgtatttttagtagagacggggtttcaccgtggtctcgatctcctgacctcgtgatcctcccgccttggcttcccaaagtgctgggattacaagcgtgagccaccacgcccggccaaagcaccccttcttagtagcaccaagggtagatttcatcccaccttgagtccttggttggatgccctcgtgcagtatacaacctgagcaactgtatgtggaggcctggtttttccctcttctgcggaatttccccttgtgtccttgcccaccctcaccatagcctttctcgccataggccaggaatggagggatgataatcttccttctctctccaggacacatgcccagcagcccctggtccatgcccttgatcagccaaccagagccgacgtaggtgtcataagtgccgcccttactgtagcntgtgtcgaaggaggtgccgtccagcagggtgccattgtagtggtagcggacanagtcgccgtcctggacatgcggngcagtggngcg

SEQ ID NO: 698 - DNA, 457 bp, Homo sapiens
  misc_feature (1)...(457): n = A,T,C or G
catactgctattgctggctattggaagaccttantgtcagaatcttcttgtgtacaagccctgaatggtgtgaccaacccaagttcctacagcatctttgcagctgttgatctcactctttcgttcctattggagaaactaccggcccagcaatgtctttgctgtgtttggcagactttaaggcacaagcacaaaagcagctgtctaagacctcctgggattttattgaaggagaagctgatgatggcataacctacaatgacaacttggcagcatttagaagaatccgcctccgccccagatacctgagagatgtgtcaaagatagacaccaggaccacaatccaagggcaggagatcaatgcccccatttgcatctcacccacagcctttcattcaattgcctgggcagatggagaaaagagcacantaaagtgctcagaaggccacattgctat

SEQ ID NO: 699 - DNA, 393 bp, Homo sapiens
  misc_feature (1)...(393): n = A,T,C or G
ggcacgaggtgaaagtcaccaaaactcgaaccatacaagaatccccatcttcctttgaaactttgctgaaactctttagttttctggctttgctcatagctgtcttcttgattttcctgtaagtgaaagatctaactggcttttcaaatgtatggagtataacgttccaactcctctaatgtaacaactttgtcttcataatcataaaccatatccaaagaatgaaaccctaccccctcccctttccggttcacctcactggcagcttggtattgctgggtctcttgcagctccattaggtttaatgccagaagataaggtccagnacttttggttcacttaaaatgttggaaggatccaggnccttttcaggaagaagctgcccccagagaa

SEQ ID NO: 700 - DNA, 230 bp, Homo sapiens
  misc_feature (1)...(230): n = A,T,C or G
taatacctggaaaggaatccagtggcaaataaggcttagtagganagccagtgcagaccatgacngcntcggagntggctgactcttgcntctcttcatgcntagtgaccacctccctttggccagagacagcagaatctgagcnttttgttacactgcagactttggtcttgaattgnntgtgtttcagcaggtcaaagnggtttncctnctttttgngntattccagg

SEQ ID NO: 701 - DNA, 145 bp, Homo sapiens
  misc_feature (1)...(145): n = A,T,C or G
gaacatggncaagngagttgccattgtgggagctngggtcagngncctggactncatcaagtgctntctggagganggactggagcccacctgctttgagaggancgatgancttcgngngctgtngtgattnaccgaanatgtt

SEQ ID NO: 702 - DNA, 145 bp, Homo sapiens
tatggagaggctgaaaggccaatattttcatagccgccaatgcaagcatccatatggatttgagggaaaacgcatactggtgattggaatgggaaacttgagctcaaatattgatgatgagctgagtaagaatgctagccacgtg

SEQ ID NO: 703 - DNA, 465 bp, Homo sapiens
  misc_feature (1)...(465): n = A,T,C or G
nnnnnnnnnnnnnnnnnnnnaaatcaagactcctttattggtggttatgccgcattctctctacgttcttcacaaaggaccagctgattgaagcaggtggtgcagagggtatttctaaaggtggttatttaagcttgacagatgcaatgaaaaagacaaatctgtgctcagcctcagtatggcggcagtcttcctctgaagatatttctcctttcctctgcatccgtgaaatgaccactgttggtccctgctctcacctcagcatcagcaatacacccaggtgtggtcttggtcgtagttgtaagaagttgcacaccacacaaggttctcctttgatcctttgttagtgcagttaaaataattcttgtttttatagttgaacggaaagtgacaaggaaagccagggaccaacgcggaaattctggtgtcggcacagaaactccacttttcatcctatcatgttct

SEQ ID NO: 704 - DNA, 478 bp, Homo sapiens
tttcagttttaaatcaagactcctttattggtggttatgccgcattctctctacgttcttcacaaaggaccagctgattgaagcaggtggtgcagagggtatttctaaaggtggttatttaagcttgacagatgcaatgaaaaagacaaatctgtgctcagcctcagtatggcggcagtcttcctctgaagatatttctcctttcctcagcatcagcaatacacccaggtgtggtcttggtcgtagttgtaagaagttgcacaccacacaaggttctcctttgatcctttgttagtgcagttaaaataattcttgtttttatagttgaacagaaagtgacaaggaaagccagggaccaacgcggaaattcctccacctgaacaaaaacaacacataacaaacttatccaatcccaacaggtaactggaccatcgggtcatcttggctgccctcttctctttgagagagttcttctggg

SEQ ID NO: 705 - DNA, 857 bp, Homo sapiens
ttttttttttttttttaaatcaagactcctttattggtggttatgccgcattctctctacgttcttcacaaaggaccagctgattgaagcaggtggtgcagagggtatttctaaaggtggttatttaagcttgacagatgcaatgaaaaagacaaatctgtgctcagcctcagtatggcggcagtcttcctctgaagatatttctcctttcctcagcatcagcaatacacccaggtgtggtcttggtcgtagttgtaagaagttgcacaccacacaaggttctcctttgatcctttgttagtgcagttaaaataattcttgtttttatagttgaacggaaagtgacaaggaaagccagggaccaacgcggaaattctggtgtcggcacagaaactccactttccatccttatccatgttctctgtggttgggcaccagagcttgttgctttcatcctccatgcaatcagagaccacattatttctgtagatggaggggaagatgcagggcttcctgagagaatttcccccatactcattcgtttcacagaatttccactgctgtttctcatcgaagacagagtgactgacaccacagactgcctaagaagctgccctgggagatgcagctgttataagcctttcctcgatagatgaaagggaagatacagcgtgggtaatcttcactctggcagtacttccactggccgttgtacacggctctggtggcacaccaaggggataagctatgaatatgggtgcaagtgaagtaaacagatcccttgtaggtgaaaggaaagacacattcctcatgcatccctccacttgactcataggaatagagaaggaaggttgtcc

SEQ ID NO: 706 - DNA, 595 bp, Homo sapiens
  misc_feature (1)...(595): n = A,T,C or G
atttataaaggaaagatgtgtttatttctccttcacctactcaaaatatatattacctgatacagtggcattatagcatgaggatgaagtgaccttgggcattgcaaagcattaagctgtgaaactatccaccgctgttaggtttgtttctaggaatgtacaacatgcagaatggagtagcgtcacttgagctctgctctgngggcaggggcaaggctggccttcacttggctttgtgcttcctgtagatctccaggaactcctgcacatcttcagaggaccccatgacgactggtgccttctggtggatctcggtgggaacgatgtctaatatatctttgtcccccgtggtggcgagcccaccggccttctccatgacataagctatggggttgcactcatacagcagccgcagctttccacttgggcttttcctgttggcggggtataaaaagatcctccatataccagagtgcggtgaatatcagcaccatggacccacataccgggcancatangggctgaccatccggagggaactttttcctctggagatactcattgatggcanggtcaantccttgcataacctcat

SEQ ID NO: 707 - DNA, 262 bp, Homo sapiens
  misc_feature (1)...(262): n = A,T,C or G
aaacagccatgctttctatttcccctccccaggaatgtaaggtgcacagcaggtcagggcagtggtgtgtgagaaaaaaggcccagccacaggcaattctccggatgcaggcagggcaggtgcccaatgggcagagtgcttttcataaacctccaggaactcgagcaagttgtcgggggactaaagatcaccggggccctctggtgaatgtctgtgggaatgacgtctaanacgcgccttttccaagtggtcggcattcccc

SEQ ID NO: 708 - DNA, 265 bp, Homo sapiens
tgcctgcctgatttttctgcacacaggtgatatattcctgcacatcctctggtgacccctaaatgagggggactcgctggtgaattgcctcgggcttcacgttcagtacaggctgggctcccagggtcgacaagccttttgtctgctcaatgatgtaggccacggttatgctattctactatatcctgatcttgcccttagatctcttttggttgtctaggtactggaagattcctccatagactagtgtgtcgtgtacgtcagc

SEQ ID NO: 709 - DNA, 435 bp, Homo sapiens
agaaacacgaagggttcacaaaatggccgagtcccgtgtcttttaattggaaatccaaacacatggggtgtcacccggatttggtttgtgaattgagaacagcactcccgcaagaggaaaatacgctatggagtataccactcactcttagagtggggggaccactctatctactttataatgaaaatgagattcgcacacagcaccttgtctgtgcgaagaaaaagccagaggggtacgacctcgttatagaaaaacaaccaacctgatctggtctgatgtggaggggggatgtcttgtacttacttgaagtcacaaaatactttttattgtttcaattacagcccgtcaaggatgaggtggtggtaaatgacgacgggtcagaccggtcctgtcacactgggagtagtatacattgaagaaaatcaaaccaca

SEQ ID NO: 710 - DNA, 147 bp, Homo sapiens
  misc_feature (1)...(147): n = A,T,C or G
gttgaaaannanaaagnattcaaggccctgnnntcggnntggtcanncgatgnttgcagnnnccctgnnctnctanccncaggtggtaatgaacctcnggaagtncacttagtctctctgcagcctgctcaggggtgaggtccctct

SEQ ID NO: 711 - DNA, 175 bp, Homo sapiens
  misc_feature (1)...(175): n = A,T,C or G
agattcaaggccctgatgtggtcacagtcaagcaatggctgccgtttccttgtctttctgcgccaggcaatantgtacctcgggaagcgcccttaanctttctgnggcctgttcgggantgaggtcacgctgggccnnggcaaagcatttnaaangccaaccatgaacttncgga

SEQ ID NO: 712 - DNA, 354 bp, Homo sapiens
  misc_feature (1)...(354): n = A,T,C or G
cagcgtcatggcagacangtggcnctgagcggacncaggtgtgcgggatcctgcgggaagancttttccaggncgatgcntccatcagtcaggatacacacatattcatcatcatgggtgcatcgggtgacctggncaagaagaagatctaccccancatctngtggctagttccgngatggncttctgcncnaaaanaccttcatngtgggctatgcngtttcccgcngtcacagtgnctgacatccgcaaanagagtgagnccttcttcaaggcnaccccagaggaagaagntcaaagctggaaggncttctttagcnngcaactcntatgtnngctggccagtaacganga

SEQ ID NO: 713 - DNA, 221 bp, Homo sapiens
gatactgctcttctgacgacagtggatgtgatgcagctggtggtgtacgccgtatgcatggatcctccaagctggacatatgctgacctagactggcccaaaagctctagagtttaattgccgttctggtgatccagagtgccaagtaatcccccacttcttagaagtgatctttatgaagtgattcagtccaccttggatgcactgctctatacatctct

SEQ ID NO: 714 - DNA, 277 bp, Homo sapiens
ggtcgacaccgaacggatagctgtttactgactttcgccacgctcacgggcaatggcgcggtaccaatgtccgtgcggtagaagcagcctttccagtcgatcttcgccgccagcttgtaagcctgttgctgggcggcatctacgctactgcccatggcggttgcgcacaatacgcgaccaccggcggtgacgaccttgccatccttgagcgcggtgcccgcgtggaacaccttgccttccagcgtacgagccgcatccagaccttcaatcagtcgac

SEQ ID NO: 715 - DNA, 574 bp, Homo sapiens
  misc_feature (1)...(574): n = A,T,C or G
ggaattaggcagaggcggaacgaggccgccanccggngtnggtttnantntnctttgncatttntcctncagagacagaacaatggcagcccgagtanttataattggcagtggaggcagggaacatacnntggccnggaaanttgcacagtntnatnatgtcaaacaagtgtccgttgncnnangcaaangaggcaatgcctgctntgaaaagatttcnnatanngcgatntcactccgtgaccanaatgnnnttgnttaancttcnaaagagangaaaancgcatttncngttnttggancagnaggaantntggntgntgggattgttgggaantccggtntgcnggagtgcaatgntttgggnnaanagccgaagggngttcagttagncgttnagnaaaagccttcnnaaaagagnttatngganaganatgcgatttnnaannggaaccatggnagggttttaccaaacntgnaggncggntcgagctttattttgngtnaccnttccttgtttgcttntgagggaagtggtttngangtgnaaanggggtntttttgaaannnnnnn

SEQ ID NO: 716 - DNA, 300 bp, Homo sapiens
  misc_feature (1)...(300): n = A,T,C or G
tgntactggagaaggaatgcgctnaagacncggaccctggacagtgagcncaagtgtgtggaagagttgcctgagtggaatttngatggcgcnagtacttnacagtctgagggntcnaacagtgacatgtatcactgtgcctgntgccatgtttcnggaccccttccagtaagancctaacaagcttggtgtnatgtgaagttttcnagtacaanngaatggnngcnnngnccaanttgaggnacacctgnngacggataattggacatggngnngcaaacatgcancccttgggtttgg

SEQ ID NO: 717 - DNA, 474 bp, Homo sapiens
ggatgaaaaaacgaccttgatattccaccctttgagttacaatcgggacaactgggagagtggaaaaaattgaagtagaatgaaaaactaagaaagactaaacaaatggaggactaatccacatagttcttgtactgacagggcacatcgccggattcaatgagaagaaacgtgacaatgaggagcttcatgtcaccgaaaacgggtcgcagttggcagaggggcgacaatctacacagatacccttcttctcctggacaacagtccagggaatgcgtatgccggcgctacgattggcaacaccagcagaaaaatcgtagatgtaggaggtatcaagaaatcacagttcaacgtcagacattgtccagacatcccttgggatcataggcacggatgatgatactggtaccacttgattaatttctacatggactcctagatgtacttcggaccattctcatcccgcatagcctt

SEQ ID NO: 718 - DNA, 155 bp, Homo sapiens
  misc_feature (1)...(155): n = A,T,C or G
gactacacccagagtgaacganctgcatcggcngcctcnggaccccnggggcctgagtggtgnctcggcttcccgtgcaaccantttgggcancaggagaacgncaagaacnaagatattctgaattccctcaagtangtcctggcntgagtggt

SEQ ID NO: 719 - DNA, 376 bp, Homo sapiens
caagaccgaagtagactacaatcagctcgtcgacccccgcgcacgataggctgaatgtggtctgcggctcctagacttccagtgtaaccagttcgggaagcatgagctagggagtaacgggagattaaagacttggcagcgggctacaacgtcaaactcgacatgttcagtgtgatgtgcgtgaaaggtgacgaagcgcaccagctgtgtgagtggatgaagatccatcccaagggcaagagcatcctgggaaatgccatcaagtggaacttcaccaagttagtcaaggtcaaaaccggctgcgtcgctgaaatcgctacggcatccacgtaggagccgcctcctgacgagagaagcatcctccctcactacttct

SEQ ID NO: 720 - DNA, 390 bp, Homo sapiens
ggtcgaccggggcctgctttttaagctgtacgaactctgggtgagcatcgctgccattgacgtcgatcttcttgaacagcgggaaactgacaccgaagttcagttcgcaaaattccgaaatggcgccctcgttgccgggctcctgcttgccgaactggttgcagggaaagcccagcaccaccagcccctggtccttgtaatgctgccagagttcctcaagccctttgtattgcggggtgaagccgcacttgctggcagtgttgaccacaagaatcgccttgccggcgaaatcggccaaggtcatttgctcacccttgatggtggtgcatgggatgctcagcaggttgtcgctcatggcagtgctcggaagagatgagaagaactgaacga

SEQ ID NO: 721 - DNA, 174 bp, Homo sapiens
  misc_feature (1)...(174): n = A,T,C or G
tgcacgagttttccgccaaggacatcnacgggcacattgtnaacctngacaagtacccnnccttcgtntncatcntcaccaacgtngccnncgantgaggcaagancgangtanactacactcagctcgttgacctncacgcncnatacggtnagtntngtttgcggatcctgg

SEQ ID NO: 722 - DNA, 360 bp, Homo sapiens
  misc_feature (1)...(360): n = A,T,C or G
ctcggngcgnncgatngccggcggtnaacctngtagagcctgngtccctgcgggcaaggtactacttatcgngaatgtnncntccctctgaggcaccacggtccgggactacacccatgatgaacgagctncagagcacntcggaccccagggcctgntggtgntcngcntcccgtncaancagtttggnnatcanganaacnncaagaangaagagattctgaattcnctcaagtanntcnngnctngtgntgggttcgannccaacttnatgctcttngagaantgcnancgtgaacggtgcaggngcacacccttntcttcagccttcctgcgggagagcnctgncaagttcccagc

SEQ ID NO: 723 - DNA, 297 bp, Homo sapiens
  misc_feature (1)...(297): n = A,T,C or G
ncngctnggaccctntacacgtatcctgaaaactggagggccttcaaggttctcatcgctgctcagtacagcgggantcaggngcgngtgctctccgcaccanccaacttncattttggccanaccaaccncaccnctgaatttctncgcaaatttcctnncggcaaggtcccagcatttcagggtgannatngattctgtgtgtttgagagcaacggcatttcctactatgtgagcaatgagggagcttgcgggcgaagtacttccagagggnagcagccaggggggtgcagtggg

SEQ ID NO: 724 - DNA, 258 bp, Homo sapiens
  misc_feature (1)...(258): n = A,T,C or G
atcctccaggagcctggggaagggaagcgcgccccccggcccggtcccggagccagaatccgcgtctacagcatgaggttctgccccttcgctcagaggacgctgatggtcctgaaggccaagggaatccggcacgaagtcatcaatatcaacctgaagaataagcccgagtggttctttgagaagaatcccccttggctggtgccggttctggagaacagccagggtcacttggtcaccgaatttgttaatnacttg

SEQ ID NO: 725 - DNA, 377 bp, Homo sapiens
  misc_feature (1)...(377): n = A,T,C or G
ccatgncggctggnaccctgtacacgtatccngaaaactggagggccttcaaggtctcatcgctgctcantatngcggggctcaggtccncgtgctctccgnaccaccccacttccattttggtcaaacnaaccagcacccctgaatttctccgcaaatttcctgccggcaaggtcccagcatttganggtgatgatggattctgtntgtttnagagnaatggncaatnnctnactatgtgnncaatnacnnacctgcggggaagtacnccanaggnatcannccatggtggtgnattgngtnancttcccngatttccganaaagtnnccnnaagccantacctgggggntcnccaccttggtnatcantggacca

SEQ ID NO: 726 - DNA, 244 bp, Homo sapiens
gggcgaattctggggctgctggaagcttacttgaagacgaggacttttctggtgggcgaacgagtgacaatggctgacaacacaattgtctgcaacctgttgtggctctttaagcaagttctagagccttctttccgcccagcctttccccataaccaacgctggttcctcaactgcaattaaacagccccattccggctgtcttggcgagtgaaactgtgtgagagatggccagtttgatgct

SEQ ID NO: 727 - DNA, 344 bp, Homo sapiens
  misc_feature (1)...(344): n = A,T,C or G
caacgccatngccaatancgtgagcannggggagnngcggggaagtnactaccagtggcagcagcccaggtggtgcagtgggtgngctttgctgattccnatatagtgcccccagccagtacctgggtgttccccaccttgggcatcatgcaccacaacaaacaggccactgagaatgcaaaggaggaagtgaggcgaattctggggctgctggntgcttacttnangacgtggncttttctggtgggcgtacgtgtgacattggctnacntcactgttgtctgcaccctgttgtggctctaattagcnggttctngagccttctttccnccaggcctttncca

SEQ ID NO: 728 - DNA, 431 bp, Homo sapiens
  misc_feature (1)...(431): n = A,T,C or G
aagcctancctcnacaccaattaacgaagctcctgtatcatggagagttcgaattgctctggcgttaaaaggcattgactatgagatagtgcccatcaacctcataaaggataggcgagcaacagttcactgaggaatttnagaccctgaaccccatgaagcaagtgccagcnctgaaaattgatggaatcaccattgtccagtcactggccatcatggagtacctggaaganactcggcctatcccacggctcctgcctcaggacccacagaaaagagccatcgtgcgcatgatttcttgacctcatcgctagtgggcatccagccccttcagaacctgtctgtcctgaagcaagtggggacaggaggaaccagatgcaatggggnccaaaaggtttattacttcnggctttaaccgctctgggagaagn

SEQ ID NO: 729 - DNA, 436 bp, Homo sapiens
ggctgtgacagctgtacacgtatcctgacaacttggaggcttcaagctctcatcgctgctcagtacagcggggctcaggaccgcgtgctctgcgcaccagcccacttccaatttggccaaaccaaccgcacccctgaatttcttcgcaaattgcctgccggcaaggtcgcagcatttgagggtgatgatgagatctgtgtgtttgagagcaacgccattgcctactatgtgagcaatgaggagctgcggggaagtactccagaggcagcagcgcaggtggtgcagtaggtgagctttgctgataccgatatagtgccaccagacactacctgggtgttccccacctctggcaatatgcacacaacaaacaggcaatgcgaattcaacggaggaattcggggaatcttggaatgcggatcatacttaagacgagact

SEQ ID NO: 730 - DNA, 468 bp, Homo sapiens
  misc_feature (1)...(468): n = A,T,C or G
gctcgactgaaacagcccaagggaatatcacactataccgatctctttaccggagaggtaaggttgcgtcgccaaggcctgatccaccgtctgcaatacgtcgatgcaagcctggcgaccacgttgatggtgtcccagttctgcttttcggcaggggtgcgaagtacgccccagaacacagtcctgaaaggtcggcgagggtcgaggtggtccagtccatccacttttcggcgttggcgcgggcttgcaggtcgctcgggtaccagttcgaatccggcgcatcttggcggccagatagcgcacgatggtgttggactcccagagcacaaagtcgccatcttcaatcatcggcacgcggccattggggttcagcgcgcggtattgcggcgtgtcgaccacaccaaaagccccgcccgcatcaattgcctcatagtccaggccgagctcctcgggncaccacagttgctt

SEQ ID NO: 731 - DNA, 528 bp, Homo sapiens
  misc_feature (1)...(528): n = A,T,C or G
aattcggaacaggtcctgcctctgattccgggctgtcatggcgacccccaacaatctgaccccccccgacgctcccgaggcggccagcccgcccattggcccagggagagcctggttctgtaccactggacccagtccttcagctcgcagaaggtgcggctggtgatcgccgagaagggcctggtgtgcgaggagcgggacgtgagcctgccacagagcgagcacaaggagccctggttcatgcggctcaacctgggcgaggaggtgcccgtcatcatccaccgcgacaacatcatcagtgactatgaccagatcattgactatgtggagcgcaccttcacaggagagcacgtngtggccctgattgcccgaggttggaagccttgcagcaagcacgggttcttcanttaccccggaagttgttnggaaggcaattncccattggattgncttaaaaggattgggttgcattcttgnatttccnaaggtttaacaaccaatttcattgattccccnaaattaagggca

SEQ ID NO: 732 - DNA, 210 bp, Homo sapiens
  misc_feature (1)...(210): n = A,T,C or G
gcttgttttcccacattgtgatgggagatgncccagaagtgtngcatggcaagccagacccggacatgttgctagcttgngacaagaggttctntccccctnctnctatggagaagngccttgtctttggagatgctcctaatggggtggcggcggcnctggcagctgggatgcnggtggttatggttcctgacggaaacttgagccgag

SEQ ID NO: 733 - DNA, 446 bp, Homo sapiens
gcacgaggttcgcgccagcggccggcgctatggggctgagccgcgtgcgggcggttttctttgacttggacaacactctcatcgacacggccggggcgagcaggagaggcatgttggagatggggtctcgatatgttgctcatgctggtcctgaactcctaaactcaagtgatcctgccaccttggccttccaaagtgctgggattacaggcatgagccaccatgcccggcccaaaaagcacaagttttattttcatatcttcatgaccagaatgaaagatgttggactctaaactaccaaacaaaggattgttactagctatatatgaagaagttggctttaaaaaatgagtgagttctagagcagttgggagagcctcactttgttgtctctaaaaataaggccaattcccaccagaaacggtgtagttagtagctgctttaaa

SEQ ID NO: 734 - DNA, 488 bp, Homo sapiens
gggccgcctgcccacctcctccacctgcttcaacctgctcaagctgcccaactacagcaagaagagcgtcctccgcgagaagctgcgctacgccatcagcatgaacacgggctttgaactctcctagctcctgtcccagccctgcctccagggctcctgggctgccagggaccttcagctcccagaggcagtgtggtcctgggaatgtgaccaacatgccaggtgacattggcccctagaccctctctatagccatgagactccttgtggcctcaagaaatttagacgcccacgacagcactacacagcatctccaggtgatgcccaaggcacagggctgcagaaaataaacctccagattccaaaaaaaaaaaaaaaaaaaaaaaaagggtattggaagcaagtcggacccattgccgttggtcccttctgcctcttcatatttgacatgtgtgagagaggggtacaactcacgaatcccttctaca

SEQ ID NO: 735 - DNA, 411 bp, Homo sapiens
  misc_feature (1)...(411): n = A,T,C or G
tgtttgtttatttgttttgtttttactgcaaatgccnttgggttaacaaaggccaacagatttagaaagaatactagccttcttcttactcttgccctccattagagacgtgaacccaagtttctaaaaaccaagaacctcactggctttaaggagttttgacgggagccctggatggctgttcagagagggaggctgtgctggcccacctgtgccgtccggcagcccgcagacgtaggtgggcagcatcctgaccgtggccagcccgtggctcttcttcttcagcccatactccagctcagcccgcatcttgggcctgcacgtccacggagctgctctcggggtcagctgggaacaaagccagcaccctgtcgatcttgcttccgctggggccttgcacgcggggagggc

SEQ ID NO: 736 - DNA, 222 bp, Homo sapiens
  misc_feature (1)...(222): n = A,T,C or G
ggaccctcggcctctctcaacccaggaaagcaactgttcgagaagatgatcagtggcctgtacctgggggagcttgtcaggcttatcttgctgaagatggccaaggctggctcctgtttngtggtnagaaatcttctgctctccanactaagggcaagatcnaaacanggcaagtgcctnccattgagaagtataaagaaggccttgctaatacaagagaga

SEQ ID NO: 737 - DNA, 468 bp, Homo sapiens
  misc_feature (1)...(468): n = A,T,C or G
nnnnnnnnnnnnnnnnnnnnnnnnnngtaggtnagatggttattaataggtttttgcacaccgaaagcctcctggggagtagggagcgggcagagggcaaggccttcaaccatacagcaaagtaggcaagganttntgcttggggagggtggaaagcctaggcttntgatggatgcaggttttgcagaggcagagtgagcctgaaggggcctccagcttcctgccacttcctctcggtntcaccccagggcatcctcctgaactggaccaagggtttcaaggcatcagantgcgagggccaagatntcgtgagtctnttgcgggaagccatcantcgcagacaggtagggagccttttntagggggtgctttggggctttggcaggnctttgagggggagcaaagagtttccnacttttttgaggggggagccttttgcggtagagaccctttggggcccaatnctgg

SEQ ID NO: 738 - DNA, 203 bp, Homo sapiens
  misc_feature (1)...(203): n = A,T,C or G
tttnttttccttgccaacaatccaaaatagatnangccatcctgatnacctgtacaaagcgatttaaatcgagcggagtggnaggagcagatgtggtcagnctgcttaacaaagccatctaaaaatcnatgggactatgatgccaacatcngtagctntgtgttgaattnacncantggtcaccatgngtgactctggtggct

SEQ ID NO: 739 - DNA, 683 bp, Homo sapiens
  misc_feature (1)...(683): n = A,T,C or G
cccttnaagtccanggtagaattgtnagattggtcngacngnaggagcagcnagnagcatgtcntacatagaggacatgaggaacatnnatatgatggaggggggtgaanggaagatgtgcatcaaaacagtntggtgaggatttgttgacattgggtgaatanatgacatccgggcccgatacgacactcngtngatncaggggtcccggatcctcgatntagagatactgagatgaccagcntgatnnacttgctcggagatcannccncagatcctgatcgacctgaccaagcagggtctcctcttccgagggcagatttcagagcgtctccggaccaggggcatcttcgaaaccaagttcctgtcccagatcgaaagcgatcggctggcccttctccaggtcaggaggattctgcagnagntggcctggacagcacgtgtgaggacagcatcgtngtgaaggaggtgtgcggagccgtntcccgngggcggnccagctctgcggtgctggcctggnccgctattgtggggaaaaanggaggagaaggaccagngggttaggagnacctgaaggttcaattntngntnttggccgggancctgnncaaagnttgancccncacttncctttggattttttgaaggnaacttntgaangganttagccccccttntnaccc

SEQ ID NO: 740 - DNA, 437 bp, Homo sapiens
ttttatgaacatgctgaacaccagaggcattcacactttattttttaaagttgatggaacttccaggggtggtggaccttcttgagtctcggcttctaaggcattctgctccagcctagccattgcctgggtcaatttctcctccctcctgtaagggcatctaagaatggggaggctgtgggtcacactgggcacatcccggggtcctgggaagcaggtcctgactccctgctctattgcctgcagcgatcggctggcccttctccaggtcaggaggattctgcagcagctgggcctggacagcacgtgtgaggacagcatcgtggtgaaggaggtgtgcggagccgtgtcccggcgggcggcccagctctgcggtgctggcctggccgttgtgggaggcatgattgaagaaatagaacttttcaagaaattttctt

SEQ ID NO: 741 - DNA, 451 bp, Homo sapiens
tttagatgagcccagtttggccatgagtttattattgttgaaagcgatcctgaatcagttggaaagagaagagcagccccaggaggcaatcccttacccagccagggcctttctgtttttatttttaaacctaaaattggcccaaccccagcgtggtggcagcatatgccagtcagagcctaatgatgaacttgatcacaggtcacctttcgatctgggacaggaacttggtttcaaaaatgcccctggtccggaaacgctctgaaatctgccctcggaaaaggaaaccctgcttggtcaggtcaataaggatctgccgcacaatctcccccaagtacatccaactggtaattttctcgaatctctgcttgccagaattaaaggacccctaatcaacctccgtgtcgaatcggttccgaatgtatttaatgcagccattgcttcaaaatcc

SEQ ID NO: 742 - DNA, 324 bp, Homo sapiens
  misc_feature (1)...(324): n = A,T,C or G
cggcacgagcnaatattccctaaatnctgggaaacaaaggtatganaagatgatcagtggtatgtacctggntgaaatcgtccgcaacatcttaatcgacttcaccaagaagggattcctcttccgagggcagatctctgngacgntgnagacccggggcatctttannaccaagtttctttctcagatcgagagcttcttcagaatcatncaccanacggtgnaggnactttcaccaaantgtaacgngtncttcctcctgtntnaggntggcagcggcaagggggccgccctnattaaggccgtgggngttcggttacgcaa

SEQ ID NO: 743 - DNA, 247 bp, Homo sapiens
  misc_feature (1)...(247): n = A,T,C or G
tatctacttcaatgctacctttctttgctccttacttatgagcagccacattgcttcgacctccttctccttcatcctcagaatctgagagttgtacataacaagctatccgctaggctgatgctgcaataaaaattctcaagactggatcttgtgcatcttcatctccactgtctgcatgaccagcatcttctggaattactngcatctggacaccaggtgcgatgaggaacatgcgcaaatattc

SEQ ID NO: 744 - DNA, 307 bp, Homo sapiens
  misc_feature (1)...(307): n = A,T,C or G
ctncaccctngacgatttacagtacatganctttcatacanccttttgcaaganngtccagangnctctngctcgnctgatnttcaatgacttnctgtcagcnagcagtgacacacaaaccagcttatataaggggctngaggctttcggggggctaaagctggangacacctncaccaacaaggacctggntaaagcacttctanaggcctntnaggacatgttcgacaagaanaccaaggcttccctttacctctccactcacaatnggaacatgtncanctcnaccctgtacgggtncctgggc

SEQ ID NO: 745 - DNA, 232 bp, Homo sapiens
  misc_feature (1)...(232): n = A,T,C or G
taaagcacttccaaaggcctctcaggacatgctcgacaagaaaaccaaggcttccctttacctctccactcacaatggggacatgtacancttaaccctgtacgggtgcctgggcttgcttntgtcccancantttgcccaagaacttgctngnttcagggtttgnnacttttnttatnggtttngtttagcagcaagtttcnttttattttgagtatcccagggtgctggt

SEQ ID NO: 746 - DNA, 550 bp, Homo sapiens
  misc_feature (1)...(550): n = A,T,C or G
cagatggaatggggcagcggcgctacaggacccagatgagcagcctgcagctgaagatcatgaaagcctgctatgaagcttaccgcacccccaccatgcaggagtgtgaggtgctgggagaggagattgggctgcccaagagagtcatccaggtctggttccagaatgctcgtgccaaggaaaagaaggccaaactacaggggacagccgctgggagcactgggggcagcagtgagggcctcttagcagcccagcgcactgactgcccctattgtgatgtcaagtatgatttctatgtctcctgccgaggccatctcttttcccgtcagcacctgggccaagcttcaaggaggcggtttcgagcccagctgaagagtgaaagcaagtgttacgatttgggccccagcacctgaggcttccccagcttttcaagggccccacttgccaccacactngcttccttgccctggggttgnccccaactttgnttcgnttggggccgttctttttatttttggcccattttggttnaagcccngttgggaatttt

SEQ ID NO: 747 - DNA, 334 bp, Homo sapiens
  misc_feature (1)...(334): n = A,T,C or G
ntttacaacacctcgcccaagccggcgcgccacgtgnaagacagnctnctcgtccgagacgggcctggacatgcgcgtggtgcaggtttggttccagaaccgccgggccaaggagaagaggctgaagaaggacgccggcccgcagcgctgggggcagtatttccgcaacatgaagcgctcccgcggcgggctccaagtcggacaaggacagcgttcagggaggggcaggacagcgacgctgagggtctccttccccgatgagccttccttggcggaaatgggcccggccaatggcttcttacgggagcttnggggaacccacccagggccttng

SEQ ID NO: 748 - DNA, 244 bp, Homo sapiens
  misc_feature (1)...(244): n = A,T,C or G
tgacccngcggcgcaatcngagancgcccacacgctctgtttgtctgagcgccaggncaagatctngtttcagaaccggagatcgaagtngaagaaagaccacaaactgcccaacancaagatgcgatcctccanttnggcctcggctactgccggcccaccaggnaaagnacaaactnagagcccacanctccatccccaccnacaccnnagcacctccanacncgttncctcctncatataa

SEQ ID NO: 749 - DNA, 264 bp, Homo sapiens
  misc_feature (1)...(264): n = A,T,C or G
gctcggccgccagaagcgcagaacnaggtncttccacgtccgatgaggacagaccagtctgaagacaggaatgacctaaaggcatcccccaccttgggcaagaggaagaagcggcggcacaggacagttttcactgctcaccagctggaagagttggagaaggcattcagcgaggcccactaccctgatgtgtatgcccgagaaatgctggctgtgannactgagctccccgnnggaccggntacaggtgtctgggggtccctt

SEQ ID NO: 750 - DNA, 411 bp, Homo sapiens
  misc_feature (1)...(411): n = A,T,C or G
agcacactaccaggaggctgagaagctgcgtggaagacccctgggacctgtggacaagtaccgagtaaggnagaagttcccgctgccgcgcaccatttgggacggcgaacagaagacacactgcttcaaggagcgcacgcggaacctgctacgcgagtggtacctgcaggntccataccctaaccccagcaaaaaacgtgagctcgcccaggcaaccggactnacccctacgcaggtgggcaactggttcaaaaaccgccgacaaagggaccgagcggctgcagccaagtaacagactccagcagcaggtcctgtnacagggttccgggcgggcactacgggcggagggcgacggcacgccagaggtgctgggcgtcgccaccagnccggccgccagtttatccagcaagg

SEQ ID NO: 751 - DNA, 711 bp, Homo sapiens
  misc_feature (1)...(711): n = A,T,C or G
nnnnnnnnnnnnnnnnnnnnnnnnnnnnnnnnnnnnnnnnnnnnnnnnnnnnnnnaactgggccccaagcttttttatttaaaaaaaaagggatacatgatgggggattaaaaaaaaaaacattattgaactttaccttccctccaaccagttgccccaaactcccctgcccccaccctttgtgttcccaattcctttcttagggaaaaaaaaacttaatcccaaaaaccctggcacaaactccaggttttttttttcctaattcctcccctccccctgtcccccattcctaaaagggcaggccccttattttgaatgcttgggaaaccccaaattggtgacaaaaacagggggaaaggtttcccccttagggaaagggaccgaggagtacaatgcantgaaatgagggctcccatancctggggtaccaaaatggggccctggggccaaaggaaaggacactggtccccctgaaaaaggagacccaccagcctaaaaatccttttgttgtgcatagtcgctgtttatcgcttgccctttttgcgccgttacaagaccacactcggaccacatccttctcgagcccaagctgttgggcgatgtggctatctgtttgcagggtggtttcggcactgcaagaacaaaattctcaggtgctcttcactcgntctcaaaactggtcgctttcttttttcgccccgcacaaggttt

SEQ ID NO: 752 - DNA, 589 bp, Homo sapiens
tttttttcttttattgtgttcacattttcataatatacagaaaaaagtacgtggttatttggtttgctttaagtccattaaaaaactggctttgggggagacaggtgggggaagggaactatcctaccacacacaccttcagtgtggtgtattccttgtttaaaaattttctaaaaattttcttctttcctttttggaaaaccaacggacatgtagaaaccattctgtccacttggtagttttcttagtcatttacttacaagggtgatgacgactggggctatttttaaattaaattaaattttgttgttgttgttgttgtggagtcccaagggtggagtttagtttctgtgaattttgcttctgattatgggtgggcatctctttaggagttttcttccagagagtctgttaagggctccaaagggactgccgtggccggctcgtgctgttttaagcgtttaattgtgtccttcagggcttgcctcttattgcagaaccaaactctaactacttctccgtcatagttcagcttctcagcaattgcggtcatttcctgcccaggagggtgtgtgctcttctcaaagtg

SEQ ID NO: 753 - DNA, 282 bp, Homo sapiens
tcggctctgtcttcctgcagatcttgcagcttgctttttcgattgccccgtccttcacctcctgccgggaaacgggaaatttgtccttgctgatctcctttctccatttcattctcctggtctggaaccacatttttacctgtctctcggtgagggctagggcgcgggaaacctccattcttcttttcctgggcagatagggggtaaaaggaaattccttttccaactgtagagactgaaagcgactgtaggtatgtcttcctcttctgctaccaggagctg

SEQ ID NO: 754 - DNA, 518 bp, Homo sapiens
ggcctgtctcccctaaggagattgagcgcatggtcggcgccattcacggcaagttcagcgccatccagatgcagttgaagcagacacctgtgaggcagtgatgaccctgcgttcgcggctgctcgatgccaggtcagggcctgcgcaacggcggaatttcagcaagcaggcgacggaagtgctgaatgagtatttttactcccatctgaacaacccttaccccagcgaagaagccaaagaagagctggccaggaagggcggcctcaccatctcccaggtctctaactggtttggcaacaaaagaatccggtataaaaagaacatggggaagtttcaagaagaggctaccatttacacgggtaaaacggctgtggataccacggaagttggggtcccagggaaccacgccagctgcctgtcaacacctagctccggtgagtgaggctggcccagggacagtcatctgtacccatgtggacggccactgagctgcatctggggaggcacagtgggacaca

SEQ ID NO: 755 - DNA, 477 bp, Homo sapiens
  misc_feature (1)...(477): n = A,T,C or G
gaaaagcctgtgttcaggagggagttgccaaggcctcaagaaagatccctcctgagtgccagggattacagattcccaggggactttcctaaggcctcggctggcccctccagccctgctcacctcggaagctcagctcactgtcactaaccccacagtcctctgcagagctctccttctcctgcttgctgctgccccggctcctcttgacgctcttatagaactgcccccagcggtgccgccctgcatccttcttcaggcgtttctctttggcccttctgttctgaaaccaaacctgccacacaagcacaagggacatactcagggggcgtccaccacaaacccaaagcccccagggaccccctagggcgggcggctgggaagcagactgaagcctgaatgggagcacaggtttggggagttgcgattgcggtcccacccttttttccccagggtggggcntcagaaattttgtgt

SEQ ID NO: 756 - DNA, 471 bp, Homo sapiens
  misc_feature (1)...(471): n = A,T,C or G
ggctggcaagaagcatgaatgtgactgaactcgcagtgcagatttggtttgagaatagaagagccaaatggaggagacatcagagggcattaatggcaagaaacatgctgcccttcatggcagtgggccagcctgtcatcgtaaccgcagctgaggccataacggcacccttgttcatcagcgggatgagagatgattacttctgggaccacagccattccagcagcctgtgtttccccatgccaccctttcctcctccgtccttgccccttccacttcatgcttcttccacctatggccacccgctggccagggttgaatttgggcccatttcccttttgttattcgtggccttcttttcacatttccccaatgttttaaggggattagcctttgtggccatttttttggccagagttgtntttggaggccaggattcatattttttgcattaggaaccccatcaaaatt

SEQ ID NO: 757 - DNA, 752 bp, Homo sapiens
  misc_feature (1)...(752): n = A,T,C or G
tttttcacagtgtacactttatttcagactacaggtttctgaacataataaaatctttggcttgtagcggcggttcagtctcgcagtctgtggggtcgtatttctcaacaagtctccggaaaacgaaaggggggcagaacagacagaccgacagaagggacccgggaggtgggggagaagaggtgggcagacacgaaaggaaacacactctcgcacacaaagaaaagtcccagagaaaccagggccggcgatgcgggtcgggaggcaccggagaagcaatgacattcaaatgaaaaaggcaacgaaaacgaaactgggcgggggcagcgaggcggtggggnagggnataaaataattataataattataataattataacaataataataaaggagattaataaaaatgtccagcaaatagagatcgctacacgtatgtgttttccttacctgaaattaaatatatacaaggtcgtaagcggtttggctagatagagctttaaggagttcgcagctccttcccttatactgggaatagagaatggatcttatttttcgatagcacctgtccgagtctttctcccttttcaaaaatgctgcgtttcaacgtcattgtccattctgaggctctctttctgtctctctcgctcttttccctgcgctccctccctccgtggagcagatgcttgtggctttcttgatcttggcgcgcttgttctggaaccagatcttgatctgggactcgttgaggc

SEQ ID NO: 758 - DNA, 480 bp, Homo sapiens
  misc_feature (1)...(480): n = A,T,C or G
gcggccgcatccggcgcggactgcggaagaaggcgtggcgccgggcgcccagggcgctcagctgcttcatcctccgctccttggagcgccggttctggaaccagacctgcagcacatggcggcggggtgaggccaccgagactccacccccgaccccgggttgctccgggcctagccagcaccccttcaccgcctggctagccgacaccgcgcgcccgcttgtgtgtgtgtgtagggtagtggtgacggtgcgatctctgactaggaccactcagggcggaccctgagccaatggtgagcaggaatcccacaggaggacctggacaggccgccgtgtctggagggggagagttgtggtatagctggagtttttctaacagtcacactatcacagttaccgcttctctggggctgtacacacatagagactacgcctctccaaaataatgtcagacacacaccgcgtntccatttcacggt

SEQ ID NO: 759 - DNA, 957 bp, Homo sapiens
tttctgggattcactaggcttatacttttattcaccaattttcagaataattataggtgtgattttctaggttatatataatttacagcttggagagtggttggaggagaataaggggtcagcaatgatttcctctactgcctgtcaacctttcccgttctgaatgccccttcttcagacatgatatccacaacagaaagccttcatttcccctcccccaccgtagcttccttagaggactccaaaacaaaacggggctcaccggctttgggaatctcgtcagctgcccccagcgcactggtagactacgaaagttcaaaccccttgcaaacatcaaagctaggaatatttcgcctgagtgcagagggagggtgatacttaaggtaataaagccacgccgtgaaacctgggtgtagcacttttttaaaaggcgctcattcgccttatttgctcttttctcttgttttctgtataattgttgcattcctccttttatccaaacgcttaacacaaactcattagggggtaatatttgtcaataatgcgagcaggagttgaggtgtgcgctcggctgggccgcccgggggggcgctgaggttgccttctcaggcggaggaggcgaacccttaaccaatacaacgccgggcttcgattttgaggagcttcttccgggatgtcgctatactggccggagacgggccttgcgtgtccattgggggatggcgatggggaccagtttccgggtagagaaggagataactcgatacaggaacgcacaggcagcctgcactcgggactcggtcagcccgatacgcagtgccagctcctcacgcataaagatgtcggggtagtgagtcttggcgaagctcctctccaactcgttgagctgtgcgggggtgaagcgcgtccggtggcgcttctgcttctgttggccctgatgatggccggcttggctgg

SEQ ID NO: 760 - DNA, 636 bp, Homo sapiens
  misc_feature (1)...(636): n = A,T,C or G
aatttctcttttctctcacaagcccatccatccatttcaatgacaaagatggcgaccacgaccaaagcttttacatcacagatgacccggatgacaacgccgaccgcagcgaaacgtccagcatagcggacccgagctccccaaatccattcggatccagcaatccctttaaatccaaaagtaatgatcggccgggtcacaagcgttttcgaacncaaatgagcaatcttcaactcaaggttctcaaggcttgctttagtgactaccgaactccaaccatgcaagaatgtgaaatgttagggaatgagattggtctgcccaaacgcgtagtccaggtgtggttccaaaatgcaagggcaaaggaaaagaaatttaaaattaacatagggaagcctttcatgatcaatcaaggcggaacggaaggcaccaaaccagagtgtaccctctgcggggtgaagtactctgcccgcttgtccatcagagatcacattttctccaaacagcacatttcaaaagtgaggagaccgttggcagtcagctccgatcggaaaaaatactacctccgacacctacccactgttcaagcagactattcgcaaagaaataaactnatcgtattaaagaaagctttcagac

SEQ ID NO: 761 - DNA, 694 bp, Homo sapiens
tttaatgagacaggagtttattctcttctgtcacagtccagaggtgagcaaggcaaggctggtgggtggctctgttatccatctcctgtgtccaagcgactgctccagttgtcaccatgtttccagtcaccaggtagagaaagaggaaatggagggcaagcgccctgctttttaaggatgtatccaggggttgctcaaatcatttctcctcatatgtgttggccagaatgtagtcctgtggccacacttcctggctctgccgggttccagatggctctcattttattctctttgggcagggctcacttggggtagcagtcactatggatattcatgaaacacccaaagttacctggtgaaggactttctttctacctgaagggaagcaatgttctcgtgtttgtgtgtatgctcaacattaaaaactattcagctcctaaagcagatacagtcttttggcctcctcatgtattatataggagatgttctaccccctaccctgagatgccagtgtgtctacaattcttcgttcaatttttccaaggtgagagagactctggctgcagagacagggctgagtgtccgtgtcgtccaggtgtggttccaaaaccagagagcgaaggtaacctgcttcttacttttatctgtccccatgttgctggtttcctgaaataatcacagtaggacattgtac

SEQ ID NO: 762 - DNA, 202 bp, Homo sapiens
gctggctactgacatcgtgggctcgctctgcgacttgtgggattttctgcagaagatctggctccgggaattttaccaggtcctgcacacacaccagccgcacttcatggccttgcactgtcaggagtttggcgggacgaactacgatgcctccatgtccctcgtggacaagttggtcaaagaactattgtctagtgatgcg

SEQ ID NO: 763 - DNA, 489 bp, Homo sapiens
  misc_feature (1)...(489): n = A,T,C or G
ggtgtgtggtgagggtggcgagcatgtgttggtcagatcaggcaggcatatgttaggtgtgtgtggaggtggcaccgtgcaggattccggctcacggctattcggccgtgggttccctggcagaagttccggttatagaagtggtggttgtccctggtcagggccatgcatgctggcctcagaagctgcgcgaccactgggctggtggggccagaggaggacactctggcggcagaggcgctggtcagcgcatcnngtagtcgggaggcttggccgtcaggcnttaggatcaccagcaccacgacgtccttgcggtcctccagcaggcgctgctgggccagcaggatagctcggtcgcaagagaccactgacccggtccgtgtgggccagcacaaacagcgtcttgcggctgccatagaccgaggcccacaggttctcaaagagggttttgccaggcagccagtcgcgttcctccaggcacaggcggag

SEQ ID NO: 764 - DNA, 429 bp, Homo sapiens
  misc_feature (1)...(429): n = A,T,C or G
nnnnnnnnnnnnnnnnnnnnnnnnnnnnnnnnnnnnnnnnnnnnnnnnnnnnnnnnnngggcagggccaattttttaaatctattttttcccattggggggttagggaaaaaaaacatggggttgaaccaaaaattgaaaaatttttgttgttttcttagtgccaaaaaaaaaaaaaaaccccccaaaggggcccccaaaatgataccttgggccaaaaccaaagggaaaagttttttggggcttgaaaaaaggggaaaattgcccctttgattaggaaagggtggccacagttggcaccggaagggaanggccttcctccttttcttttcttttctttagaatcgggggagagagtntatgaagaaaccacccaccatcctggaatcctcagccacctaaaaaactggtgtttttgacaaagcccttg

SEQ ID NO: 765 - DNA, 294 bp, Homo sapiens
ctgaaatatcatgatctggctgctgaggtgctcgtactggcattgggagaacccataccgagatattaatttagccggatcccatcggaaaagaactattcaccaagggcctaaatggtggtacccaagagagagcccttcatgactgcggaggcctcaatggcctaggtgtttcgaatatgacccacattttgggaggcctccatgagcaatgaccggaacaccaaaggcccgtgcatactctgacaccttgtccactgctgttgcttggagccttcccacaggccagaactt

SEQ ID NO: 766 - DNA, 410 bp, Homo sapiens
  misc_feature (1)...(410): n = A,T,C or G
tcagatggctgggcttttaagaacaacatggacatcagaaatcaccagaaccttcaggatcgcctgcaggagcccatctactgctggccaggagcccccagtgccctgtggtggtggacaccatgcagaaccagagcagccagctctacgcagcactgcctgagaggctctacataatccagggagggcaggatcctcttacaagggtaaatcttggcccttgggaacttacaacccagagggaagttcgtgctgttcttgggaaaagctccacagtttantcttgggacagataccttcattnttagggtgaccaacgggaggggtttttcnaagggtttaggttnttcccttgaggacccagttgggttttttaccctttngaccnttgttccntaggttgattcatt

SEQ ID NO: 767 - DNA, 440 bp, Homo sapiens
  misc_feature (1)...(440): n = A,T,C or G
ttctggcccttggaactacaacccagaggaagttcgtgctgttctggaaaagctccacagttaatctggacagatacctcaattctaggtgaccaacgggagggcttctcaaggcttagctctccctgagacccagctggcttttacccttgacctgtgtccctagctgaatcactagctcagatttttctgatctaaggcaaacaactcccaggctgagggaatgcagggccacagcacccaattcaaggacaaattgttattattcaggaaaatggaaggcaacatttgaggctgtttcagggccagtttccctgtttggaaggaaacagtttccctgtttgganggaaagtagggaggccttngacactggtttcccactttttggggnggacccacattttccnttggcacacgggtntttttgggggaggagncg

SEQ ID NO: 768 - DNA, 941 bp, Homo sapiens
aaaatgaagcaacacttgagctgttcaggccagttccctgttgaagaaacagttccctgttgaagaaagtagagcctgacactgctcccactttggagaccacattccctgcacacggtctttgagagagcagttgcactctacaggcacacttctgaggtacggtatctctctccagccactctgataccaagtaattcaagctggcattccttctattagggaaattcattttacccaatttgcatttatggaattgatcatttaagacactaaattagtttttagaaccaattatgggaagaattccagttgttaggaagagatgaggagttggaagaggagggattagaaacaggaggaggcagtcatcctctccttgcccaaaagatttaaacctgtccacattggtggtgatgatgggtgagtttccatgggtaacacatccctaaatttttaccagggaagaggagagtactcacttttaccatctttgaatatatttccatagaaatctagctctctgtacccctgaaatcttcccactagccctcacttttcaacagagtcatctagaagggagggttggcttcccaaaagcataaccttgaccaaaccaaacaataggcacccagcaatgctgtcattcagttatgcagaagctcatttgtgaaattctgtttctctgatttcttcgcaagtctcttaatggtcatttgtgttagattacatcaaactgatggatagccattggtattcatctattttaactctgtgtctttacatatttgtttatgatggccacagcctaaagtacacacggctgtgacttgattcaaaagaaaatgttataagatgcagtaaactaataacagaattattaaaatatatcaggctaaaaaaaaaaagtcgacgcggcccgaaatttttttagttatgta

SEQ ID NO: 769 - DNA, 379 bp, Homo sapiens
  misc_feature (1)...(379): n = A,T,C or G
nnnnnnnnnnnnnnnnnnnnnnnnnnnnnnnnnnnnnnnnnnnnnnnngtaacaaatgtgatatttggttcttgtcagtttgattccttcatttttgtctctcattttgttcgacatttaagtccagcatagggatgttatttaatttacattctcacactctaaaagaaatactattctgaattaagtagaaaaagaataagcaagtgtagttactctggtacccattaatcacattttccatatttttcaaattttatacgataatgaaattccctctgttcaacacaaaagaaacactcattctggaaagtgtggccatttgaggcacaaacaggtgctgtcacattggggcagtctgcattgtaatcagggtcca

SEQ ID NO: 770 - DNA, 387 bp, Homo sapiens
cagctgtagtgacaatctcagagcagcttctacacacacagccatttccagcatgaagatcactgggggtatccttctgctctgtacagtggtctatttctgtagcagctcagaagctgatagtctgtctccaaaaaaagtggactgcagcatttacaagaagtatccagtggtggccatcccctgcaccatcacatacctaccagtttgtggttctgactacatcacctatgggaatgaatgtcacttgtgtaccgagagcttgaaaagtaatggaagagttcagtttcttcacgatggaagttgctaaattctccatggacatagagagaaaggaatgatattctcatcatcatcttcatcatcccaggctctgactgagtttct

SEQ ID NO: 771 - DNA, 398 bp, Homo sapiens
  misc_feature (1)...(398): n = A,T,C or G
tttatcttttgtattatcaaatattacataatacaattttaattaaataaaaaaattatacatatnattatttttgccaagatggctattcttccatctccttcttccgtgagtgctcttttttgcactgttgaattgaatgagggtagacttgctcatccttgaatgcaggtttcttgacattccttttcactgttgaatctatttcctgagccattacagccactgaaccaaaatcgggcacaagagttgacctgtttgtcataataccatcgaaccacatattcaccacagtttccaggcttcaaggcttccaaacatctaggatcctctgccccatccacaggggtgctgagcagtggcctgggggtggtggtggcctcagatgaggtagtggc

SEQ ID NO: 772 - DNA, 382 bp, Homo sapiens
ttttttcatgattgcaacatttatagaatttcaggcacagagatgaagcacttgtaggagcacatcagggagaataaatgtgggggtagaggaatgaacctcttgttcacacacacacacacacgcaaatgccttctatggccctcagagcaatcccgaatccatggagggctgtgttcttgttagaaaatcaggtgaacttgcagaatttctcacatttttctttcctcgaaaagttgttgctgttgcctccgcagcctccgtaagcaaataactcccattccacagtttcaaagttgaaaaaccatcgcgtcatgtaggtttgaccagggcccttttccataggaaaagcgcatacatttgggaggagatccttgatagt

SEQ ID NO: 773 - DNA, 530 bp, Homo sapiens
  misc_feature (1)...(530): n = A,T,C or G
tggaagttgagtgcatttcccaaaaaccgtattattggaagcggctgtaatctggatactgctcgttttcaattcttcattggacaaaagcttggtatccactctgaaagctgccatggatggatcctcggagagcatggagactcaagtgttcctgtgtggagtggaatgaacatagctggtgtccctttgaaggatctgaactctgatataggaactgataaagatcctgagaaatggaaaaatgtccacaaagaagtgactgcaactgcctatgagattactgaaatgaaaagttatacttcttgggccattgctactctgtagccgatttaacagaaagtattttgaagaatcttaggagaatacatccagtttccaccataactaagggcctctatggaatagatgaagaagtattcctcagtattccttgtatcctgggagagaacggtattaccaaccttataaagatagagctgacccctgaagaagaggcccatctgannaaaagtgcaaaacactctggg

SEQ ID NO: 774 - DNA, 168 bp, Homo sapiens
gaaattgtccccgcagttgccaatcatgtctgaacccaatcagagtacttgtgaccggagcagctggtcaaattgcatattcactgctgtacagtataggaaaaagaactgactatggtaaagaacagcctataatacaatactgttggatatcaccccatgatggtg

SEQ ID NO: 775 - DNA, 455 bp, Homo sapiens
  misc_feature (1)...(455): n = A,T,C or G
tccgcacgacatgttacnnaggtctcgagagccttcnctcaccngtgcnnantggcaactctnanggnaaaactcattgcaccagttgcggaagangaggcaacagttccnancaataagatcactgtagtgggtgtngnncangttgntntggcgtgtgcnatcngcattcngggaaagtctcngnctgatgaacttgctcattgttngatgttttngaagactaagcttaaangagaaatgatggatctgcagcatgaggnncttanntcttcagacacctnganttgtngcagatncngnttattctgtgaccgccanttctaagnntgtactggtactgcaggagtccgtcagcangaagnngagantcggctcaatctggtgcagagaaatgttaatggtctnccnnttcattattcctcagattcgtcaangtacgggtcctggnttgc

SEQ ID NO: 776 - DNA, 540 bp, Homo sapiens
ttagactaaaacacataacatttattttaaaatacctgagctcctaatgacactccaaaaataaaaacaaatacaagaattagaggctactaggggcatgaattcatcattccaaaaattaataaacagggaaggaaacagcatttatcctgcttttccttgactgactgtatttaaaggtagcgaaggtgctggagccgctgccgacgagtctggatctcactgccgcgtgccccaacacccgccggacgtgcattctcgattccttttgtttccaagtccaatatactctcaagtatacgctcaaggatcagcttattcacagtcttctaaaggaagaacagatcctccagaataagattacagttgttggggttggtgctcttggcatggcctgtgccatcggtatcttaatgaaggacttggcaggcgaacttgctcttgttgatgtcatggaagacaaattgaagggcgagatgatggatctccaccatggcagccttttccttagaacaccaaagattgctctgcatagactat

SEQ ID NO: 777 - DNA, 320 bp, Homo sapiens
taaggccctcctggatgccccacagggaacctgcactttccttgagctgagcaaccccatcacccttaagcttcgggttgaaaacgctggtaaacccccgggcattgaggaaacagggaaggcccaggaagacttcattcccaaggccaaaaacccccttaaccattgttgacacgggatgaacccgggaaagattttccaacagggatccaaaaagatcagccacacttaacccaaaagccacgggggtaaatgccttagagcggaaggacttcagaggcactttcaaccaccattctagggacttcccttccaatttt

SEQ ID NO: 778 - DNA, 269 bp, Homo sapiens
acagggtatctgcactactccttgatctgagcttcctcttcatcctttagcttctggttgataacggctggttaatccccggtcattgttgatacatgtaaggcttaggaagactttattctcattgccatacatcccctttaccattgttgactcgggattgaatcctggatagatttttcaacattgattccataagatcggcctcccttaattcaatagcctcattggagatatctcttttgcttgattgacttattaggcacttt

SEQ ID NO: 779 - DNA, 497 bp, Homo sapiens
aaaagtaaattttattgggtaaagagccaaaatggcaggcataaaaccaagcatgggcttggatttgggggccccaaattcacatttggaaaaaaaccaaagcaaacggggacccaggtccagggaggaaaacaaagggccggggtaaaccacatgggagttttaaaatttctccagccaaaagccaactagccacgggtttttaaggccctttgggaggccccaaagggaatcggcccttttttggagcggagcaacctaatcatcctttagcttggggtggaaaacgcgggtaaacccccggccatgggggatacagggaaggctaaggaaaactttattttaaaggccatacatcccttttaccatggtggacccgggatgaatccggggaggattttccaccagggattcaataggaccagccacacttaatccaatggcccagttggtaacccctttagctgggggacttaataggccctttcaaccaccat

SEQ ID NO: 780 - DNA, 322 bp, Homo sapiens
agggtttttagggccttctggatggcccacaggggatttgcactttttttgagctgagcaaccccataatcctttaacttctggttgataacgctggttaatccccgggcattggggatacatggaagggttaggaagacttcatttttaatggcatacattccctttaccattggtggcacgggatgaattctgggatgatttttaacatggattcaaatagatcaggccaacttattccatagccccaagtggtatttcttttaagctggatgacttataggcactttcaaccaccatcttatgcacttcctttcaattt

SEQ ID NO: 781 - DNA, 805 bp, Homo sapiens
tttttttatactggtggtttacgatttaatattcattaaattctttttctcctcaaagttactaaacccacccccaaaaactccttcactgaacagtgaaaataaagctgtcctatgcagccataaaaaacaaaatcatgtcctttgcagcaacatggatgcagctggagatcattattccaagctaattaatgcaggaacagaaaaccaaatacatgttctcactataagtgggagctaaacatgtgggtgcacatggacataaagatgggaacaaatgacactggagactactagagagggagggagtgagagcagcaagggctgaaaaactattaggtactttgctcagtacctgggtggcaggatcaatcctaccccaaacctcagcatcacacagtatactcatgtaatgaacctacacagtgtacccccgaatctaaaagttgaaaatttaaaacaacaaagctgacctggattagtaacaataagcagtttgcagtgaggactgtactgggtaatattgggaatcattaatttaaagatggatacatttcgctggactaaatcaaggcgtgtttctccttttttctcgcgtgcacctgctgtgataatcactagatttgacgttgaattgacacagtaatctttgctgagacaaaattttgcattttcataaaaacgcgtgcatgttgaagatccattgtctcacccttcagtttgccctcatccacatcccacaggacaaggtcatcactcaaacctttaataagatgctgatagcacaagccacaccacccgatcc

SEQ ID NO: 782 - DNA, 867 bp, Homo sapiens
  misc_feature (1)...(867): n = A,T,C or G
ggcgcacttccgcccgggcgcattgtagccccgcggacagctgggccagggtgcgggcctgcgcctccctcggctcctggcgcgggcctcggggagaggggtggaagatgtctatggatgtgacattcctggggacgggtgcagcatacccatctccaacccggggtgcctctgctgtggtccttcggtgtgaaggcgagtgctggctctttgactgtggggagggaacacagacacagcttatgaaaagccaacttaaagcagggagaattaccaagatcttcatcacacaccttcatggagaccatttctttggccttcctgggctcctctgcacaatcagcctgcagagtggctccatggtgtccaaacagcctattgaaatctatggccctgtagggcttcgggactttatctggcgaaccatggaactctctcacacggagctggtcttccattatgtggttcatgaactggttcctacagcagatcaatgtcctgcagaagaactaaaagaatttncgcatgtnaatagagcagacagtcctcccaaagaggaacaaggaagaactattcctgttagactcagaagaaaactcataccttctgtttgatgatgaacaatttgttgtaaaagcatttcgcctctttcacagaattccctcatttgggttttcagtcgtggaaaagaaacgcccaggtaaactcaatgcacagaaacttaaagaccttggtgttccaccaggtcctgcctatgggaagctgaaaaatggaatttctgttgttctggaaaatggggttacaatttctcctcaagatgtcttaaaaaagcctattgtcggaagaaaaatctgcatattgggtgac

SEQ ID NO: 783 - DNA, 439 bp, Homo sapiens
gttggaaggcactgagagggggcaggggcagctgacacagggggcgctggggtcgtccctgctgctcatgaagccagcctggcagcgctcacagtgggccccttcggtgttgtgctggcagtccacacagacgccagagccagggaggcagcggtctgagtgtccatggcactgacaagggacacatcggcccaggaagagacctttgacgtcccgatagaagccgggggcacattcctggcatgagtccccccggtagctggcggggcacaggcacagctccacattgctggccagggccccctggcctgctgggctggccacctccagtgccaccctgcgcagggagacagccgaggagatctgtgagaagagggcacggatctgcagctgctccaggctggccagcaccatcatgagctcctcgcgggacacagtg

SEQ ID NO: 784 - DNA, 439 bp, Homo sapiens; identical to SEQ ID NO: 783

SEQ ID NO: 785 - DNA, 418 bp, Homo sapiens
  misc_feature (1)...(418): n = A,T,C or G
nnnnnnnnnnnnnnnnnnnnnnnnnnnnnnnnnnnnnnnnnnctccgcaaagctgccccaactttatttgcaaaaagaggctccaagcccccggaaaggaggggggctgaaaggccccccccctcctcccggcctcccggggttcctgccctcctccaggccccccacggcccccgccccgccggttacacaaccccaaactggcaaatgtagggcagttgatcggggcagcgcttgtcaaaccacttgccgttggccgcccctgacaggaccgcccagttttgggttttgccgccatcgggttgcgcggggatctaagcctcccattttttgaaggcaatgcgggccccggtcatgtccacccaggggccctcggccgccatgtcgttgaggcccacccaaatctcggcctngttgc

SEQ ID NO: 786 - DNA, 580 bp, Homo sapiens
ttttgagttctggctttagtgacaacgaaggcaaaatggattttaggtgggcaaggactgtctcctagatgtcagtgtccattccggagccacatttttggcagaagatttccttgttctgggtcaggaagcctttacccaccaaggagacagagcatttcccgcagttaaagcattcgctatgccactggctgtcttgaaagcagataaacttggcacctgtgagaccactaatgggtttggaacaggctacacacttgttggcataaagatggttgtagcagtccatgcagaatggatagtcgtctctggacatgaactgttcttcacagagatctttcctacagccactacacagaaaacactctttatgccatagctggtcacaaaatgttatcccacctgaagttatcaccttcttacaaaagttgcagtagtgagcaaactccttctcacaacatggcacacaataattgccactctctttggagatcaaaggctttgtcgctataggttgtcggcaattctcacacacagaacaggtatcatgccagtagtttcccttaaattccattttgcg

SEQ ID NO: 787 - DNA, 548 bp, Homo sapiens
ggcccgaccagggtgaccatccttccagaagtagatgaggtccaccagcggctcggagcacttggcacacacaaagcaggtggggtgccactgcttgttgtagcctgccctgtccgagtagaccacggggctgtcaggaggggccgctcccttgcagagctcgcagacctggaaggatggggaaggaccataggagacaaggaagtcaggagagcacagtgacatgggttcgaattccagctccagcctttctacttcctgggtgaccttgggcaagtcactatacctcttcgtgcctcagttttgtcatctgcaaagcgacacaataatattgcctacctaacaggctattcacgaggactaaataaagttatttatttagcacagtgattcccaaattgtttggtctcagtaccctttatactcttaaaaattatcaagacccctacagagtttttgttcatgtgggtaatagctattgatatttaccataagagaaattaaaactgagaacaatttaaatttttttaattcatttaaaaatgaca

SEQ ID NO: 788 - DNA, 480 bp, Homo sapiens
  misc_feature (1)...(480): n = A,T,C or G
tccttccagaagtagatgaggtccaccagcggctcggagcacttggcacacacaaagcaggtggggtgccactgcttgttgtagcctgccctgtccgagtagaccacggggctgtcaggaggggccgctcccttgcagagctcgcagacgtattccacttctttggacgggtcactgagactgccgttggtggtagcagcagtggtctctgccccctctggcttttcctgtcactggctgcttctccttggggatgagctccatgtactgcagtcccagtttctgggtgactccagggggagcccactcgtaggtgatggtgtcaaaagtgggatctttcccagtagcaatagggttggtcatgatcatccggttcctcttgtaaatccggatgccgtccccgcctttcacccgagcagtgagnggtggaatactntggagtccatcagcaagcggccaattttcccgatcgtcttctag

SEQ ID NO: 789 - DNA, 515 bp, Homo sapiens
  misc_feature (1)...(515): n = A,T,C or G
gggagccaacattttattgaagaagccacagaggctgaaattcaataaacacaagttttatgagtaccttgaagctccagaatgtgctggggaaaggggttgtgatggccaggaggaggatacccttcaaaacgggctgttccctaaccagatagaaatgggaaagggaaaaaattggcagagaaagtctagactctctggcctaccatggagcctaggcccaggcccccaagatcccaccttccccaacccccatgggactggagatttttgtagcttccattggaccatgaggggcatgatgggaggcctgagttagggtgaccttttttgtgagcgtctcatttgaattttatcttcactgggtcatagatgtagcagcccacatcgccaatgttcacacctttggggacaaacaggtagccgtagcangggacgtggcagtaggggactccatcatgctcagcatgacttccagcagtcagggtcttgtggcaacgcttgcacctcagaca

SEQ ID NO: 790 - DNA, 431 bp, Homo sapiens
  misc_feature (1)...(431): n = A,T,C or G
agacacctgcaaaggggaagtggtccgcgtgcacaacaaccacttccacatcagatgcttcacctgtcaagtatgtggctgtggctggcccagtcaggcttcttcttcaagaaccaggagtacatctgcacccaaggactaccagcaactctatggcacccgctgtgacagctgccgggacttcatcacaggcgaagtcatctcggccctgggncanctttaccaccccaagtgcttcgtgtgcagcttgtgcaggaagcctttccccattggagacaaggtgacctttcangcggtaaagaatgtgtntgccaaacgtgctcccagtccatgggccagcaagtaaagcccatcaagattccgtggaccaaagccactgtgccgggtgcaaggaggaagatcaagcaacgggccagtcacttccttggcta

SEQ ID NO: 791 - DNA, 421 bp, Homo sapiens
  misc_feature (1)...(421): n = A,T,C or G
gcgtgatccactccttttcctctaagaatgctgaacggtaccactctagaggcagccatgctctttcacgggatctccggaggccacatccaaggcatcatggaggagatggagcgcagatccaagactgaggcccgtctggccaaaggcgcccagctcaacggccgcgacgcgngcatgcccccgctcagcccggagaagcccgccctgtgcgccggctgcgggggcaagatctcggacaggtactatctgctggctgtggacaaacagtggcatctgagatgcctgaagtgctgtgaatgtaagctggccctcgagtccgagctcacctgctttgccaaggacggtagcatttactgcaaggaggattactacagaaggttctctgtgcagagatgtgcccgctgccaccttggcattt

SEQ ID NO: 792 - DNA, 280 bp, Homo sapiens
  misc_feature (1)...(280): n = A,T,C or G
acgaggactcgtgctcctcctcggccccgctgtccccgtcgtcctcgccccggtccatggcctcgggctccggctgccctcctggcaagtgtgtgtgcacagttgcggcctggagatcgtggacaaataccttctcaaggtgaatgacctatgctggcatgtccggtgtctctcctgcagtgtttgcagaacctccctaggaaggcacaccagcttgttatattaaagncaaagacattttntgcaaactttgattaatttcagaagggtatggaactcg

SEQ ID NO: 793 - DNA, 136 bp, Homo sapiens
gagcccctgcaccttggccatagccacatcccaagggcccaaagttcattgcatagcttcctttacaatagatttcgccagctttatcagtcaaagttgttgattcaagactcttcccacactttgaacatcggaa

SEQ ID NO: 794 - DNA, 428 bp, Homo sapiens
ggaggaatggaagcagctggatcccactcagaggaatctctaccggaacgtgatgctagagaactataacaacttaatcacagtgggctacccattcaccaaacctgatgtgattttcaagttggaacaagaagaagaaccatgggtggtagaggaagaggcactaaggagacactgtccaggcatttgcatcaagtgtgggcttggcatctacggagcgaggcaggcgtgccaggccatggggagcctgtaccacaccgactgcttcacctgtgactcctgtgggcgccggctccgcgggaaggccttctacagcgtgggcgagaaggtgtactgccaggaggacttcctggtgagtccgcgccctgcccgcgggagcaggccgggggcaggtgctggccgggcagcgagagccccctggtcacacg

SEQ ID NO: 795 - DNA, 235 bp, Homo sapiens
  misc_feature (1)...(235): n = A,T,C or G
gggggttttacccccccttgggttggttttaacaataaaaccgttcttccaaaaaaaattaaccaccctgtttgaggtttaggccgcantcactgcacattaaacacttgggatggtaaaacttgtcccgtcccttgacaaaggtccccaacatacccgggcccaaangcgtgcactttggcaacccccgaaaggcttttaagagacccccaatttgtttggacccctgggttaa

SEQ ID NO: 796 - DNA, 448 bp, Homo sapiens
caccgccgcaccttgggcccgcaggctgttcggcatcaagtgcgccaagtgccaggtgggcttcagcagcagcgacctggtgatgagggcgcgggacagcgtgtaccacatcgagtgcttccgctgctccgtgtgcagccgccagctgctgcctggggacgagttctcgctgcgggagcacgagctgctctgccgcgccgaccacggcctcctgctcgagcgcgccgcggccggcagcccgcgcagccccggcccgcttcccggcgcccgcggcctgcatctgcccggtaagcgcgccggggcctgtgccggggtgagcggggtgtatgtgcgtgcgtgtgtgtaggggtacgcttgtgtccctaacgagaagttgtcagttgtgtgtggttccgtctgccgggatagtgtttttctgtatcagtgcggaactgtggtgctgggaaca

SEQ ID NO: 797 - DNA, 550 bp, Homo sapiens
  misc_feature (1)...(550): n = A,T,C or G
gcgctggtgcattctgtttcctcttgatctcaaagcacaaatgtggatttggggaccaaaggnaggggacacatccccttagaggacctgagttttggagagttgtgagttgaagggangagcagcaagaagcagcctgttttcactcagcttaattctccttcccagataaggcaagccagtcatggaatcttgctgcaggccctncctctactcttcctgtcctaaaaataggggccgttttcttacacacccccagagagaggagggactttcacactggtgcttgagttgaccgggngctgcttggcgtctattctttaccaaaaccatccatccctagaagagcactagagcctgagggtctgggcttgggcatgactgagcccatggtcttcttctacaatttcacagaggtctttcagctcatttaatcccaggaaagaggcatcaaacctttctggcctgttatgattctgaacatttgacttgaaccacaagtgaatctttctcctggtgactcaaataaaagtataatttttaaaaaaaa

SEQ ID NO: 798 - DNA, 478 bp, Homo sapiens
  misc_feature (1)...(478): n = A,T,C or G
ggaaccatgaaccccaactgcgcccggtgcggcaagatcgtgtatcccacggagaaggtgaactgtctggataagttctggcataaagcatgcttccattgcgagacctgcagcctgctggggctaagcggtggaggaaggctctgtcactccaggcatatgtttccccatctctgtctggggctacagaatagggtggcagaagtgtcaccctgtgggtgtctccctcgggggctcttcccctagacctccccctcacttacataaagctcccttgaagcaagaaagagggtcccagggctgcaaaactggaagcacagcctcggggatggggagggaaagacggtgctatatccagttcctgctctctgctcatgggtggctgtgacaaccctggcctcacttgattcatctctggttntcttgccaccctctgngagtccccatcccattntcatcctgagcccaaccaggccct

SEQ ID NO: 799 - DNA, 1216 bp, Homo sapiens
taaattgctcatttatgtgaataggtgtcaagggtctcagagctgccatggagatggttcaaagttagagtataatcaaggcactctttagttggctggtaaaagttattctcccacagatatatgtatagagcttttcttaaattattatcagtgttaatagcagagtgtgacttttaaagaagaatcttgagctgcccaggtgaaagcctccattccactcccgtcctccaaacaggtcagtcagtgggaagcgcatatgctcctactgcaataacattctgggcaaaggagccgccatgatcatcgagtccctgggtctttgttatccatttgcatttgtttttaagtgtgttgcctgtgagtgtgacctcggaggctcttcctcaggagctgaagttcttcgtccagaaaccaccaactgtactgcaacgactgctatctcagattcaaatctggacggccaaccgccatgtgatgtaagcctccatacgaaagcactgttgcagatagaagaagaggtggttgctgctcatgtagatctataaatatgtgttgtatgtcttttttgcttttttttttaaaaaaaaagaataactttttttgcctctttagattacatagaagcattgtagtcttggtagaaccagtatttttgttgtttatttataaggtaattgtgtgtggggaaaagtgcagtatttacctgttgaattcagcatcttgagagcacaagggaaaaaataagaacctacgaatatttttgaggcagataatgatctagtttgactttctagttagtggtgttttgaagagggtattttattgttttttaaaaaaaggttcttaaacattatttgaaatagttaatataaatacataattgcatttgctctgtttattgtaatgtattctaaattaatgcagaaccatatggaaaatttacatttaaaatctatccccaaatgtgctttctgtatccttccttctacctattattctgatttttaaaaatgcagttaatgtaccatacatttcctccactaaaggagctctattttctttaccagaaatgttgctaagtaattcccaatagaaagctgcttattttcattaatgaaaaataaccatggtttgtatactagaagtcttcttcagaaactggtgagcctttctgttcaattgcatttgtaaataaacttgctgatgcatttaa

SEQ ID NO: 800 - DNA, 673 bp, Homo sapiens
  misc_feature (1)...(673): n = A,T,C or G
gtttaaagtgattctttaacacatcatcatttccaagcttctgtgtcttcactctttcctgtcacattgaaacacttttctactttcattgttaagtaggacggtttacagtttgcaggcatgaggatgaggatgaggatgagaaacagtttctgtttactgagcagctactatggccggccgaatgccacacacatacccagttccagtctcctaacacctggcgcccatcacacgacgggtcagtggtgagctcagatttgaacttgggactgcctcactgcaaagccaggtctttcttctgctcttacacttaaaacagcccaagtgccagtgcttgtccaaggctaccagggcctggccattcttgatttctgtgccgcagcccccacaacttcggaggccctgggacaggtgcgcgctgctgcccaccgatacgggcagggaacacttctggcacatgcattccttcccgttgaaggtcactcggtccccggnggggaagggcagccggcagacggcacacacgaagcagtcggggtggtagtcttgcccagcgccgcaccacctcaccctcaatgaactgtcgcagctgaagcagcgggtgccgtagagcctctgtagttcagcgtgcagtgtactcgccctgccgcacgaagaagccgccctcggc

SEQ ID NO: 801 - DNA, 330 bp, Homo sapiens
  misc_feature (1)...(330): n = A,T,C or G
ctcgtncgatctttttnaagataatttttgctgatgagtgcacagaagctgagggtcgccattggcacatgaaacacttctgctgccttgagtgtgaaacggtcctgtgnaggacagaggtatatcatgaaggacggccgccccttctgctgtggctgttttnagtctctctatgcggagtactgtgaaacctgtggggaacatattggtgtggaccatgcacagatgacctatgacgggcagcactggcacgccacggaagcctnctttttttgtgcccagtgtaaagcctcttttttgggatgtcccttccttcccaaacagggtcag

SEQ ID NO: 802 - DNA, 452 bp, Homo sapiens
  misc_feature (1)...(452): n = A,T,C or G
cactaaacatgattctttaacccattcctgtcaacactggcatcgaccaacctcccaaggtccctgctgtacccctcaaaaccattaagcctttgctggactgtgatctaagggcggctggcaaacacagttttgtcggtttccaccactcactctgctgagatcagcttggcctacacgaatgggtcctgtctgctcccatcccttcttacttgtggtaatctcggacacagtagatcttgttctctgagtccacggtgaagggcaccccatccaaacactcattacagatgacacagcggaaacagccggggtggtaggacttccccagggcttgcaggatctggagcagagaccaagactcagtggggattatagggaaggatgagatggtggaangggaaaggaacacatcaggcctaaggattacatgaagcagtcacacacagagt

SEQ ID NO: 803 - DNA, 501 bp, Homo sapiens
gggggagaaggactttatttggagtcaggtgggtgggagcagggaagggtcatggctggagggtaggtccaggtggtccgggctctgtgtctggtggtagggtgggctctggaggtgcagacccgggggctgcctagtgttcgggaacgcagcttcccgtctgcaggggcgtgaaaatgtcctcctccgagagtcccttgcgctgcaccaatttcttaaattcttccagggcctcccggttggtatcagaattcctacccacaagctttcccatgtggagcaggcccccatggtgctggtctttgcagtaaaagatgtagtggtccctcctgggcagctcctgcaggtacatgagcttcctgcccccataggcgctgtatttgccaggctcctccgtcttccgcatcaggattttcttctggatgcacctatcctccctcatgaaggtgaacgtggctttcaacttcccacagccaaggctgtcaccttcactggggacac

SEQ ID NO: 804 - DNA, 439 bp, Homo sapiens
ctccagcttcgtcgaggagaaccagtgttagagccgaagcatgctgctacagcccgcgtcgtccctcggctcctacagctaccgtagtccccacgtggggagcacctactccttgtcagtagttgagacctactactaccagtacgcgcttctgtacagcctatgcatcaagagccctgctaggtacttccgcatggccaccctctacagcctaacccagacccccagtgctgagttaaaggagaaattcacctccttctgcaaggcccagggcttcacagaggataccattgtcttcctgcgccaaaccgataagtgcatgacgcaacaataatactcgccatggctcaagctagaatccacgccatccatgttaacccacgctctggatatctccgctctgttacttctccgagcccctacctctgttccccgccaa

SEQ ID NO: 805 - DNA, 133 bp, Homo sapiens
cgtcaatccactggtcgatgggaacagggaaaacaatgtggttttcagggaggcccaaaaatttggagaaccgaatgaagttctcctttagttccgaagccagctccttggttctcccgaaaagggtgacctt

SEQ ID NO: 806 - DNA, 1696 bp, Homo sapiens
tgataaatctcaatggtagagatagagggagttacatattatttacttttcagtgtttgaaaattttcttaataaaaatttgtataggtttaagaaagaaaaagtgaatagctgattatcatttttcttcacttaagaactttaaacacagaatttaaatttttcatattttttgaaaattaacatatatttattacagtgccaaatctcatgagtccctgtctcataatctaagaccaggccaccctcaaagaggacagagttcactgcctaatccaacactggctgtagtgtaaatgcaacacaggtgatttttgccccagttccaaggctacctaactagctatgtgggccttagtcacccttaaaggaagatggtttgcaactatgccagttagaacatttttctgctctgcttccacagtggcactcacaagaggaggacttgattttatagcttgtgtacaggagaatataaagttggcttcaaaggaggtaggataggtttggcatttttctcctcataatgtttcctgaagcatgaaaggatccttgatcagaagagtgctcagttctaatttctaaaatttgctggcttaatatttttaaagatttaattctccatatgagtaaagttagcgtgtaccaccaaaaactatctagaactgtgtgcagagactgttactggttttccaagttgtatatttttgagtatcttaaaatatttcatcaactttctaaaacatcaagaaaagctctctatacaaataccatggttgattttaattattttgttttccatccttttaaaaatattttctgctttgcatcccattattattttgagtttcttttcatttgtagtttgttgttcattgtgttgttttacagctaagattcatttcatacgtttgatgcttagctgaaaaattacaataaattctccaatgaaattatgtatctttatttaatgaaaatgcctgctgcgtaccaaggtatgtactagggcatctggggtaagtaaaaacaaacacatagagcctgcctggagaagctcatggtctgatggaaagataagcaagaagagttaatttctaatcaatatgataaaaaggtcagagagcagtttctgaaaaacatgtttttgagttgagtcctgaaagacaaggagatgttagtaaagcagagaagggagaattcattctagaaagatcagacagtgtgtgggaagggcagagtctgaaaagagcattgccccatttggagaagcattcaagaagcccacgtgttagaagcacccgccccatgagacaaagacacagctagagagattgactaggccatgtcggaatgtcctcttattttatacatacataagcatatagatacatatagccaaagttacctttttaatgatcttttttacccactgtattctggaggtcgaatggtcacatatgaacatctccgagaggttgtgtttggcaaaagtgaagatgagcattatcccctttggaaatcagtcattggagggatgatggctggtgttattggccagtttttagccaatccaactgacctagtgaaggttcagatgcaaatggaaggaaaaaggaaactggaaggaaaaccattgcgatttcgtggtgtacatcatgcatttgcaaaaatcttagctgaaggaggaatacgaggg

SEQ ID NO: 807 - DNA, 451 bp, Homo sapiens
  misc_feature (1)...(451): n = A,T,C or G
tgaccttgcgccggacgggccagtataaggggctcgctggactgcgcctaggcgatatcctggagagggaggggccccgtgccttctaccgcggctacctccccaacgtgctgggcatcatcccctatgcgggcatcgacctggccgtctacgagactctgaagaactggtggcttcagcagtacagccacgactcggcagacccaggcatcctcgtgctcctggcctgcggtaccatatccagcacctgcggccagatagccagttacccgctggccctggtccggacccgcatgcaggcacaaggtgaggcctgggcgggaggatggggcagggggaagtctcatcgcttgggccccagcttctcccaagtagaagccctgggctgggaccctactggaaaacgatgggcttntntgggcctncgnttncccatttgtgacattgaaat

SEQ ID NO: 808 - DNA, 1226 bp, Homo sapiens
  misc_feature (1)...(1226): n = A,T,C or G
tttaaataaaagggaaaatttacttggagaaggcgggcaaaaacgaggaggtcaatgggtgttggcagcggtaccagggacagtgaggggggctttcctgggctcaggcctcgccggccgcctcagggtgcttctgccgcaggtgtttgtccagggtggctcgcaggccgaagggcacatggcagtgggggcactcgaagcgggtgctgccaggcgtcatgccgtgcatgcggcggtggcggttgagcttactgctctgggcgcaggcgtagttgcagaactcacaggtgtaggggcgctccccggtgtgtgagcgccggtgcaccgtcaggttgctgctgttggtaaaatgcttcccgcagaactcacagctgcccccgggcccgcggctcttgccccctgacttgggcatctttttgggtgatgccttctggctgtttgcagggtcagttctttgttccgtggtgatggctccccaagtgtctccaccaggcccggcttgagccccactgccaggagccccgggttcctggacacctgctgtggcggcggctccagccccctcaccaccgctgcatggaagggtgctggtgggggcagcagcatggacagccggctccggaggggctgcagaggcctgctcctggctggtgtcggccatgagggggctctggggcggcacctgccggtgggtcttcttgtggcggttgagcttgctgctctgggcgcaggcgtagggacactggtcgcaagcatagggccgctcgcctgtgtgtgagcgcatgtgcactttgaggttgctgaaggagctgagggtcttcttgcacacaggacaggtggggctccgccgggtgaggccgctgccacttgcacgggggctcttggcctcagctgctggccccaccactgccgacacggctgcagccacctcggccaggcccaggagcggggcctccggggcctctgattctgtctggtagatggacagtccgtggtcccactgggcgtgacgcagcagcttccaggccactgtgaactgtttgccacagcgcaggcagctcaaggccttcagctcctctcgttctgagccctggccgcggctggggcctctgaagagctgacagcccagcttcttgtggtccatgaaggcagtgatggcctccaacgggaaggtctgcaggcagcggccgcaggtntggcggcttctctnttgacaactcagctgg

SEQ ID NO: 809 - DNA, 656 bp, Homo sapiens
tttttttttttttttttttacaatattgaaaactaataagatgatcgtttattggaagaacagcaacacaaaccaaaataaacctataagaaaacaatggacataatgaaacagaaaacaaagctcagtggggaggacacatatttactcaaacatcctggcaattcatatctagggcactccctctgtgtgtcagacgcccttgcatgtgtcaaatgtcatctgataacattgatgaaaaatatcattcacttcttcttggtgcagaaggcatagaccggattatgcaatcactgagaagtagcttctggatgtgttttctgggtgggcgtcttaaccaatttcagccgactgaaggctcttggacacttggaacatttgtagggtttctctccggagtggatgcgctggtgctccttcaggctccccctgtaggtgaaaactttcttgcagtctttacattcgaagggcttctcccctgtgtggcttctcttgtgacacttcaagtaggacttctgggtgaactgcttctggcagacgtcacacgtgtagggcctctcgccagtgtgggttcgctggtgaaattggaggctaataagctgcatgaagcgcttcccacagagattacattgaaagagtctctcgcctgctcgtgc

SEQ ID NO: 810 - DNA, 978 bp, Homo sapiens
gcggccgcagctgccgcctctgccagcccccagctgcccagacccgcgcctgccccctcggggccctctccgccgccggcccctgagcccccgcacaccgagcagggccccacattgcagcagacggagcagggcgcactcaaggcgggcaggccagggccgggctgcaggggagaggggagaaccccacggtgctggcgcttgaggtggcggcccaggctggagcgtgaggagaagcggagctcgcagaccaggcagcagtagggtttctcaccagtgtggacgacctggtggtgcagcaggccggtggagtcgcggaaccccttggggcaggcagagcagcggtagggccgctccccggtgtgcgagcgcaggtggttggctaggttgaagctgtgcttgaaacccttgccgcagcgcggacatgcgtggggcttgagcgctgtgtgccgggcaaagtggcgccgcaggtctgagcggtagcggaagctcttgccacattcactgcagtgaaacgggaccctgggggcggcagcggcgggcggtgctggtgcaggggttggggcggggacgtcatccatggtggcggggaatacagtggtatgtgggggctctctacctcccctcggcgccgacgaattaaagtaaaatttgtggcaataaatgctaacgtgcctacttaagctggtgcacagcaaagacgcaacaagtaagctgtttggatgactattatcccgtaagttcctcctggattcctccttaagtcctaccatgattgctaagttatttgacttatctagagccgtctcgggtccactaagacccacttccaaaactccacccaatttttcctttaaagaagccacatcctttctaagactctccacgtggactcccgtcaccttctcaggccttctctacgaagtctattcccatcccctgcaagtcctttccacattcattataaagacctgatag

SEQ ID NO: 811 - DNA, 636 bp, Homo sapiens
  misc_feature (1)...(636): n = A,T,C or G
ggtcgacgcttcagccagaagacatgtttaatatcccatcagagatttcacacaggaaagacaccctttgtatgtactgagtgtggaaaatcctgctcacacaagtcaggtctcattaaccaccagagaattcacacaggagagaaaccctatacatgcagtgactgtgggaaagctttcagagataaatcatgtctcaacagacatcggagaactcatacaggggagagaccgtatggatgctctgattgtgggaaagctttctcccacttgtcatgccttgtttatcataagggaatgctgcatgcaagagagaaatgtgtaggttcagtcaaattggaaaatccttgctcagagagtcatagcttatcacatacacgtgatctcatacaggataaagactctgttaacatggtgactctgcagatgccttctgtggcagctcagacctcattaactaacagtgcgttccaagcagagagcaaagtagccattgtgagccagcctgttgccagaagttcagtctcagcagatagtagaatttgcacagaataaaaaccatatgaatgcaaaaaaaaaaaaaattnnnggccctttccttttttnccaaaaannccnngggcccctttttttttt

SEQ ID NO: 812 - DNA, 534 bp, Homo sapiens
tgaactaaatggtaaattttattactttaagaaagaagggaggaatggatattgagacagcaactagttctgtctgccacagtacatcagtcagtgtccagcaattatgttcaaatctatgtcacacagaatctacatattgaagaccatgtgttctgttcacaatgcaattaaactgaaaagataactaaaatattcataggatctacagttgtgacacatataagaatgaaatactcactgataaaaacaatcatagctataacatttataaggtttgtcccagtataacaggcatccagagttgggccagaaggctgtttccaggtgaccataacagggcttctctccaatatatgttctaaagtgagaaaggaggcatgaggggcaacaaacacttccctgagtcatttcattcatggagtttctgggccattgtggattcgcttgtgccttataaggttagtgcttggtgctaaaggctttttcacactgaaaacatttaaagggcttctctccagtgtgagttctcac

SEQ ID NO: 813 - DNA, 627 bp, Homo sapiens
  misc_feature (1)...(627): n = A,T,C or G
ctcgaaaaagctagatagggcaaaagtcatccgncncggtnctgaaaatggtacacatgtcagtcatgatcatgtgcttcctatatatggcagaatcctcatggaagagaattcctgtgaataaggtgaaagtgaaaaagcctctagtcaccacttactcccttttcaacaggcagaaaatcaacctggtgagcactccctggagtgtaaccattgtgggaaattcagaaagaacactcgctttatttgtacaagatattgcaagggagagaaatgctataaatatattaaagtataggcaaagtcttcaaccatccctcaaactcttaggagtcatgtgagcattcacattggagagaaaactcttgaatttactgattgtagaaaagctttcaatcaagagtcatccctcaggaaacacttaagaactcccacaggacagaagtttcagggagtatgaggcaatgtgatatgtccttcagcctacactcttcctgctcagtacgtgagccaatacctactgggagaggaaggtgatggaattgcagtgactatgggccaaattatctccccttggtgttccncacaaaaantgggtagttttggnaggagggttttgggattntt

SEQ ID NO: 814 - DNA, 537 bp, Homo sapiens
ggttattttagtcagaaaacagcagttatagttgaatatttagaaaaatgtttttctttttttcctcatagtaccatttgaagatgtttagtggttctaacaccaatttaaagtctttccacaaaaatgaactccaaaccttttcgtacatcacttgaagttatcagacaagagccttagatcttgtacttcggcctttggttttgtttccttcaggtgaattggaagcatttgccttatgagttttcttatgatgttcaaggtaagtctttttggcaaatgcctttccacatttattgcatctgtgaagagaaaagttttttgtgacttttacttcaataccgacgtcagctacttcatactttttactaggagagttagaagtgccatcatgttttgaatcactatgttttgcttcatccctcgaagggcctctttttgccactttatttagaacaaaatcaataggcttttttatagctctgatctctaaactggctgttattttcccaagataacgacggacgcggggcgact

SEQ ID NO: 815 - DNA, 1529 bp, Homo sapiens
  misc_feature (1)...(1529): n = A,T,C or G
ttccttccttccgcccgcccgccggcccgccctaagagttgaccacgccgcaatgaagagcttcttacagtgaaagcaaagtaggtcgagtccactgaaaatgcctttaagggacaaatactgtcagactgaccaccatcatcacggatgctgtgaaccagtttatatcctggaacctggagatcctcctttgttacagcaaccactacagacatccaaatctggtattcaacaaataattgagtgctttcgatcaggaactaaacaacttaagcatattttattaaaagatgtggacactatttttgaatgtaagttatgccgcagtctcttcagaggattaccaaatttaattacccataaaaaattctactgcccaccaagtctccagatggatgacaaccttcctgatgtaaatgataaacaaagccaagccataaatgatctcctagaagccatatatccaagtgtggacaaacgagaatatattattaagctagaacccatagaaactaatcaaaatgcagtatttcaatatatttcgaggactgataatcctattgaagtcacagagtcaagcagtactcctgaacaaaccgaagttcagatacaggaaactagcactgaacagtcaaaaacagtaccggttacagatacagaggtggaaactgtagagccccctcctgttgagattgttacagatgaagttgcacctacatctgatgaacaacctcaggagtcgcaggctgacttggaaacttctgacaattctgattttggtcaccagttgatatgttgtctttgtagaaaagaattcaattctagacgaggtgttcgccgtcacattcgaaaagtacacaagaaaaagatggaagaactaaaaaagtacattgaaacacgaaagaatccaaaccaatcctcctaaaggacgccagtaaggaatgttctagttccattaagtaggagttgtccagtatgttgtaaatcatttgctacaaaagcgaatgtaaggaggcattttgatgaagttcatagaggactaaggagggattcaattactcctgatatagcaacaaagcctgggcaacctttgttcctggattctatttctcctaaaaaatcttttaagactcgaaaacaaaagtcttcttcaaaggctgaatacaatttaactgcatgcaaatgcctcctttgcaagaggaaatatagttcacaaataatgcttaaaagacatatgcaaattgtccacaagataactctttctggaacaaactctaaaagagaaaaaggccctaataatactgccaacagttcaagaaataaaagttaaagttgaaccagcagattctgtagaatcttcacccccttccattacccattctccacagaatggaattaaagggaacaaatcattcaaatgaaaaaaagaacacacccggcagccagaaaaattaaggttaaccagactcttgaaaggccttaaacaactaggtccgcngtgncaggtggccgcaaaaaacccnggaaac

SEQ ID NO: 816 - DNA, 1318 bp, Homo sapiens
  misc_feature (1)...(1318): n = A,T,C or G
agcggccgcactcgctgcacacgaatggtcgctcacccgtgtggatcttctggtgcctcagcaggttgctgcgttggctgaacaccttgccacatacatcgcaacggccgcccctaaccaccccgcccccagtgctggggcggccccggctccggcccctgggggagcgccagcgggtggtgatcagagcagggcccacaccccggcagggatcctcgtccgtggggtcctgttcactcctcagatcgctggggagcagaagcgcatgcgcaaaacccaccttcgcgggagggtgattggatctggccagaaaggccagccatgccgaggtcccaggggacgtggaggtgagggcttacactacctggacctgcggagatgctgcctagctgcagcgcgaaccctgcatacacaaggggaccattcattcatgacagaatgcccacccgtgccgggacccacttcatccctggggacacagtgtgaactacagggacctgaaactgaccaaagaggcagacggaggcgacaaatgcaggggtagggattctatctgtacagacttccctgatgaggtgataatgagacagaacccagcacaaggaggaagactgggctatgtgaaaaagctttctaggtctgatttaggttggaaaaaatcgtttttggaagggctgtagggcaagcgtgggggcattgtctaggtggaaaatgatggtctcagcaaatgcagggaagtgggtgggtctcggaggctggaggtggagccaacagaaagagggtgcaggctcctggatagtggtctggggtttgggatgtgccttgcttgttgatgtctgtggggcatctgaggaacacagacttcatgaaggctgtggggaaacgtgagcaagggctctagggcatacacatggcacacagaacccgggcctgcaagtgatcaacacaggggtgggtatctacagaggagagaagtgggtcccagccacactgtgagcactccagcgtcagacgctggntgtaaggaggaggcaccagcaactccaactgagaatcagggcctggagaaggcggaagcctggaggaggttaaatcaagaagactgagagagcagtgagggcttttagtggtgagagaaagtccataagtcgccaaagaaaagtcagataaactagaatacatcaaaggaaatcagcaaaaaccacatcagagtcaaaagacaaatggccaaaaaacaaaaaaaattaaaaaaggacaaatggcaaaccaaaaaactctccacaggcaaaaggctaattaacccggacgcgnggtcgac

SEQ ID NO: 817 - DNA, 890 bp, Homo sapiens
agtgaagcatgagagtggccgctgccatgtctgcgtcgagtgcggcctggacttctccaccctgacccagctcaagcgccacctggcctcccaccagggccccaccctctaccagtgcctcgagtgtgacaagtccttccactaccgcagccagttgcagaaccacatgctcaagcaccagaacgtgcgacccttcgtgtgcactgaatgcggcatggagttcagccagattcaccacctcaagcagcactccctcacccacaagggcgtgaaggagttcaagtgcgaggtgtgtggccgggagttcaccctacaggcgaacatgaagcggcacatgctgatccacaccagcgtccggccctaccagtgccacatctgcttcaagacctttgtacagaagcagactctcaagacccacatgattgtacactcgcccgtgaagccattcaaatgcaaggtgtgcgggaagtccttcaaccgcatgtacaacctgctgggccacatgcacctgcacgccggcagcaagcccttcaagtgcccctactgctccagcaagtttaatctcaagggcaacctgagccggcacatgaaggtcaagcatggcgtcatggacatcggcctggacagccaaggtgggtgggccaagcgcaatggacagagcaggaatgataccaacatgacgcactcaggagcctcctgcccagttagaggagtggggaggctggccaaggctgagacttcgttggggtgggctcaggtctggaaggggggtaccctggaaggccatgatgacaataacgatgggatatttatgtcttcttcaaaggacttaaatgagatcacgtaaacaatataataaaaatcataactaacatttattgagtgctaaa

SEQ ID NO: 818 - DNA, 392 bp, Homo sapiens
tttgagacaagatcttgctctgtcacccaggctggagtgcagtggtgtgagcatggctcactgcagcctctgcctcctgggctcaagcgatcctcctgcctcaacctcccaaagtagctgggaccacaagcatgcaccacaacgcctggctgacttttatattttttgtagagatggagtcttgcaatgttgcctaggctggtctcaaacttctgggctcaagcgatcctcccacctgggcctcccaaagtaatgggattacaggcgggacaacttgttgcccgatcttaccctgtgaatccttcaacctgcctcaacttgagccaacagagctgctggcaccttcctggaaagccgactgcggtgactgctgcatggtcctggacctagaa

SEQ ID NO: 819 - DNA, 644 bp, Homo sapiens
  misc_feature (1)...(644): n = A,T,C or G
ccgagttttccgccgacgcgcgcatctcacagagcacacgaggcttcacagtggcgaggagccttccagtgtcccgagtgcgacaagagcttctcctggaaggcctccatgaagttccaccagcggatgcacagggacgagaagcccttcgcgtgcggtgagtgtgacaagacctacacgcatcagtctcagctcaccgagcacctgaggctgcacagtggagagaagccctaccagtgtcctgaatgcgagaagactttccgcctcaagggaaatctgaaaagccacctgctgcagcacagtggccaaaagccattctcttgtgtgatgtgcggcaaaagtttcactcaacagtaccggctcacagaacacattcgagtccacagcggggagaagcccttccagtgtccggagtgtgacaagagctactgcatcaggggcagcttgaaggtccacttgtataagcacagtggagagaggcccttccagtgtcccgagtgtggcaaaggcttcctccagaaagagaagcctgaaaggccatctgtgncttcacagtggggagaaggcttttttcttgtgatgagtgtggaaggagcttcacgtacgtggggggcgctcaaganccacattgcagtgatgccaaa

SEQ ID NO: 820 - DNA, 963 bp, Homo sapiens
cttttttttctcattttaggggtttactgaacacctccccatctcatcccggagctcactgagggtgggagatgggtgccccataaaacaggaggaagtggaaattagggtcctgagttccgggagatgcccagagaccccagacccccaagcctcaccccatcctgtgggagcaggggctgtgcgaggctgctgggcccaggggcatccctcgttccctgcctcgcttaggaagggatcaagtaggctggagacagagaggggcctggcaccccaaatcattcaggcctagtttttttttttttcctttctcgctctttaatctcactctgctctcttgacacagttccagcaatgcagccccaggcaccagctccgagaaggatgcggtggggcggggtggggaacctgcccagggggcccagctctggggcggggcgggggcgcctccttccggcccgcggtccgggcggccctcgcagctgtccaggccccggcaagcccgggcgtggtgtccgagcggacgaataaataggggcggtcagtggtcaggtgggtcaggtgggcttgtgatccgggtggcttttgagcgtgtggaacttgacgctgtccagcttctcgaagcgcttcccgcagcgatcgcacgtgaagttgtactgcacctccgcagtgtgcttcttcatgtgccagttgagcgacgcgcgctgccggcactggtagccacagatctcgcactgcaggggggtctcgccggtgtgggtgcgccgatgtacctccaggtggttcttcctcttgaaggacttgccgcaggtctcgcaggtgaattcacggacacctgaatggatgatcatgtgccgccgcagtggattggataaaatgaacttcttgccaaagccaggatgagggcacacttttggtctttcctttccgatgcacaagattgacgtggttctggaaacttct

SEQ ID NO: 821 - DNA, 1580 bp, Homo sapiens
tcgccacgcgtccgtactctctggagtcgattgccccgagacacatgggccaaggaggggtcagcggcgaattctttcggcctgttggggacccctcgtgtccccacgccagactggacctcccgtatgaacttctcttcgcatcggcggcggcttccgtcacctccgctcccccgatcctattcccagtcgtatgccagcttggagagtcacgtgagagcaagagagtagctttctggttgtcctggtgccctgctcaggcaaactgactgccattctctgaggatggcagctctgtcccccacatttgccacgtccacccaggattccacctgtctccaggactcagaatttcctgtttcttcaaaagaccattcctgtccccagaatttggacctgttcgtgtgcagtggtctggagcctcacacacccagtgttggttcccaggaatcggtgactttccaagatgtcgctgtggactttaccgagaaggagtggcccttgctggattcttcttcagagaaaactgtacaaagatgtaatgctgggagaacttacagcaacctcactttcactggggtattcaggttcggcaaacccagcctcatctcacacttggagcaggaggaggagccgaggacagaggagaggggcgctcaccagggcgcttgtgcacgattgggagactccatctaaaaccaagtggtcacttcttatggaagatatttttgggaaggaaacgcccagtggtgtgacgatggaaagagccggtcttggagagaagtccactgaatacgctcacttgttcgaagtctttggcatggaccctcatctcactcagccaatgggaaggcacgctggcaagaggccctatcaccgccgcgactatggggtagcgttcaagggcaggccgcacctcactcagcacatgagcatgtacgacgggagaaaaatgcatgaatgtcatcagtgccaaaaagccttcaccacgagcgcgtccctcacacggcacaggagaatccacaccggggagaagccttacgagtgcagcgactgcgggaaagccttcaacgacccttcagcccttaggagccacgcaagaactcacctcaaagagaagccctttgactgcagtcagtgtggaaatgcattccggaccctctcggccctgaaaatccacatgcgagttcacactggcgagaggccttacaagtgtgatcagtgcgggaaggcttacggccggagctgccacctcatcgcacacaagagaacgcacaccggagagaggccctacgagtgtcacgactgtgggaaagctttccagcacccctcccacctcaaagagcacgtgaggaatcacacgggggagaagccctacgcgtgcacgcagtgcggcaaagccttccgctggaaagtccaactttaatttgcacaagaaagaaccacatggtggagaagacctacgaatgtaaagaatgcgggaaatcctttggcgatctcgtgtcccggaggaaacacatgaggattcacatcgtcaagaaacccgtggaatgtcggcagtgcgggaaagaccttccgaa

SEQ ID NO: 822 - DNA, 664 bp, Homo sapiens
gcacaggagagagaccccatgtgtgtcctgactgtggaaagagtttcagtaagagttctgacttacgtgcacatcatagaacccacacaggagagaaaccctatgggtgtcatgactgtggtaagtgcttcagtaaaagctctgcccttaataagcacggagaaatccatgcacgggaaaagcttctgacacatgtcatgctcccaagtaatgcccctgaggatatataacggaaagaggctcaataaatgtattgtttagaaagtcttccaatagtgagattcatctactattctgtgtccagttagcttaggaaattcactttaggatttatgccactgtttgttccttgtttttcctgatctagactcaaatccccaaggcagtctaaagaatgaaaggaagatttcagtccctctctttgcctgcatctgaattgatggataacatcttttccctctcagtgcctatggtgttcccttaatataagcacagaggacaaggtaatagatcctatgaatttgataagcatccttctttactcattctgtcattcagctgcattttgacaggaaaaacccattacatttcgagaagaagttatgagactttgcccattaggtgggtctagctcttttttttttttttggagacggagttttgc

SEQ ID NO: 823 - DNA, 669 bp, Homo sapiens
catttaggacactgcaatatttttttgttgctgttctgaatgaccactggagttaacccctcatgaacatttcctacagaatcaccagcctcaggttcttcttctgcatcattatgatccttttcactttgttcttgaatgtcagagtactcatctgacatctcctcctctagctcatcttcttcagcattatattcacttccagggtcctcagaatcatttctatctgacttttccttatcaaaattttcttgattcaaattgtctgacccatcaccactttcctgttcatcatcgctggtgtcatcaaacttaacagggcacttccgattcctttttgatcttcttgcggagaaacttctctccagcatttttaacccatgttttttccctaataaaagggacctatgggttttagccaaatgattctctaaagactttttataacaaaaatgtctactacagaatttgcactggatgattatttgatagtcttccagttaattcatttagtgtttcttctggtgatgacttttcagttagctctgaatgaaaaggggcaacattttcgttatttaacaactttactggcatctataatgtccaaaaattttgcagcctctaaaacaagaggtatttcatatttgtacctgcccgggcggccgctcg

SEQ ID NO: 824 - DNA, 877 bp, Homo sapiens
gtccgccgtgacatttcattttttttaaatagtgtattttttttccatttttttttttaagagaaacaaacaaaagactcgccagtcaatgactttcaaagagaactaactttggcttattcatattctgttcaaagacagtctattttttcactgtagaaagcgtccttgtgtgatagttacgttcgcaaacgcgcacgccaggcccatggctgtaccttggctttttttttttttttttttttttttaatttttcctaccatcagaaagtgtgctttgctcacagaagaatgggatgtccttttttctttcttggctttttttttccccctttttgtttcatttttataaattaaattttcagacatatcaaatacagttctgagggtaaggtcatgggggagctcggacccagtggcgttgggtgcggttgagggggacgctgctgtaagaggagagagatgacagtggtcctcctctgagagcctgagctgtctccccgtctcccgcccccaaggagacagagaggatcctacttcttcggggacagtggctgtatggctgtgctgccccacatcagggaccctttccccctgggactatggggcagtttgggagcaaaaccagaaggacaggcccccctctacccgcctaccctgagcaagcgagttgttcctctttgtacaagggcaggtctgcggttactttcaacactgtttattccagcggaagcagccgggtggttttcccacccccgtgtatgtagatatatcgactttgtattaaaggaagatcgtctgaaaaaaaaaaaaaaaaaaaaaacaaaaataataataaaggggctgagcctatagaataaatctacacaaaaaaacc

SEQ ID NO: 825 - DNA, 1205 bp, Homo sapiens
  misc_feature (1)...(1205): n = A,T,C or G
aatctttcagccagaagtatgaccttgttgtacatcagaggacacacactggagagaagccctatgagtgcaacctgtgtgggaaatccttctcccagagttccaaacttattacgcatcagcgaattcacactggagaaaaaccgtatcagtgtattgaatgtgggaaatccttcagatggaactctaacctcgtcatacatcagagaattcatactggagagaaaccgtacgattgcactcactgtggaaagtccttcagccaaagctatcagttagttgcacataaaagaactcacactggagaaaagccctatgaatgtaacgagtgtggaaaagccttcaatcgaagcactcagctcatcaggcatctgcaaattcacactggggagaagccgtacaaatgcaatcagtgcaataaagcctttgcaaggagctcctaccttgtgatgcatcagagaactcacactggtgagaaaccttttgagtgtagtcagtgtgggaaagccttttcagggagctctaaccttctttcccatcacagaattcattctggagagaaaccctatgaatgtagtgactgtgggaaatccttccggcagcgatctcaacttgtagtgcatcggcggacacatactggagagaaaccttaggagtgcagtcattgtgggaaagctttcatccagaggtctcccctcatcatgcaccagaggacgcatgtcggtgggaagagctatcagtgtgacgtgtattaagccagcggttgtgactcattgaacatcagaggacatatcctggagaaaagccctacgaatgcattgattgtgggaaagccttcaatgatcgctccaacccttagtaaacacgagaggacacacactggaaggcaaaccctatgaatgtgaccattgcgagaaagcctttagccaacggtgtcaacttacttaggcagcagagaattcatactggagagaagccctgtgaatgttaacaaatgtggaaaagcttccagttatgatactttccttattcaacatgagaaagctcatgggcaagaaactctatgaataaccaagatggagccgggtgcagttgccaacacttgtaatcccagcactttgcgaggcccgaggcangtggatcacttgagcccaggagtttgnaaccagnctgggtacatggcaaaatnctgtctnccaaaaatc

SEQ ID NO: 826 - DNA, 412 bp, Homo sapiens
ttttttttttttttcacgttatgacaaaaacatttattgagcactttctgcgtgccgggcaccatgccaagcccctggcgcacttcatcatactggatcaacatgtgtctcttcagtttgtccttgcggttgaacgcagactcgcacactgagcatttgtagggcttctcacccgagtggatgtgagcatgcagtttgagataatgctcccgccggaagaacttcttgcacacttggcacttgaacctgcccccgctgccgtgggtgggcagatgacgccgcaggtagcgttcacaaggaaacacttgtagacggcattgtccttcttggggctgtgctgtggcaggaggctgtgggagtactggtgcacgcccaggtcgtacagcgaggggaagtccttgccgcagaggtg

SEQ ID NO: 827 - DNA, 937 bp, Homo sapiens
  misc_feature (1)...(937): n = A,T,C or G
cgcgtccgcacagggctcacacaggagagaaatcttgtcagtgtaatgaatgtggaaaaatcttttaccgtaaatcagaccttgctaaacatcagagatcacatacaggggaaaagccctatgaatgtaacacatgcaggaaaaccttctctcaaaagtcaaatctcattgtacatcagagaacacacataggagaaaaaccttatgaatgaattggatattagaaatttccagccacaagtcagcctccataatgcctcagagtcttcacactgtggagaagggcctgttgacatcctgaatgttcaataactatccacaaactcgccttatgttactccaaagtaacagtaggggataaacccatagactacaacaactataggatggcttttgttaggaagtgatattctgtttgaatatcagatggttaatactggcataaaacctcacagatttttttgaatttgtgaaagtttttggcaaaaatgcaaataagattatgttagaatttacactgaggagaaaattgtcaatttaagaaatctaaagtgaaaattttgcttagaaataaaatacgacaagttaanttttgantacnattccataatantttttatnncacctaacnaaaatttttttntngntngtttttnggggaatgtaaagctttaagaacttaaacaaaggtaataattaaaataacctcacaagaagtttaatgagtagagagaattcccatgtacacttcaccaaacttcctctaaggataatgtataatcatagtatatggtcaaagtccaagaaatcgatgttaccttgctggtagatagagacttagtcagattttacttatggtttgcatgcctctggggtggtgtgngtacctgtatgtgtgtgtggtgtggggntatatcaaaactttttaccgactttt

SEQ ID NO: 828 - DNA, 491 bp, Homo sapiens
  misc_feature (1)...(491): n = A,T,C or G
caagggactttttaagtggctttaagatttgtttagttataaaaccaaaatgtaaatacatggaatattatataatagaaaaatagctccaacataacaatagaagaaacattacaaggcactaaatagtttgttgcattttaaaacacaagttttcaagatctgtttctctgtgacctctgctttgtataatatacctacctctttcactagtccaagtaattcagattcatgagccagaatgtcccccatattgaactgttactggtaattaattctcacagcaaaaatctctaggaggcaaaaatacaagacaacagctttcatttcaaccacctatgaaactacaaaaaggtggttgtggtgagcaggaataatggcccccaaagacatccatgcgccaatcccccagaacctgtgaatacgtgaggttacacggcaattggggattaaggtgcagatggaattaaggttgctcatcagcntgacct

SEQ ID NO: 829 - DNA, 904 bp, Homo sapiens
  misc_feature (1)...(904): n = A,T,C or G
acgcgtgggcggacccgtgggtgcggaggtggcggccgggctgggatagcgcgagtggccgcggccgagcagcagagatttttgctgtgagaattaattaccagtaacagttcaatatgggggacattctggctcatgaatctgaattacttggactagtgaaagagtatttagattttgctgaatttgaagacaccttgaaaacattttcaaaagaatgcaaaataaaaggaaaaccactgtgtaaaacagtaggcggatctttcagagactccaaatcattgacaattcagaaggatcttgtcgctgcatttgacaacggagaccagaaggtgttcttcgatctgtgggaggagcacatttcaagttccatccgagatggggactcctttgcccagaagctggaattctatctccacatccattttgccatctatcttttgaagtactctgtggggagaccggacaaagaggagctggatgaaaagatttcctacttcaaaacctacctggagaccaaaggggcagccttgagccagaccacagagtttcttcctttctatgccccttcctttttgtttcccaaccctatggtgcaacccctcaatttaaagaactcttccaggattcctggactccagagttaaagttgaagttggaaaagtttctagctttaatatctaaagccagcaacacgccaaagcttttaacaatatataaggagaatggacaaagtaacaaagaaatcttgcagcagctccaccagcagctggttgaanctgaacgtaggtcagtgacatacctcaaacggtacaataagatccaggccgactaccacaatctcattgggagtcacagcagagctggtggattctntaagaggccncagtctgcggcaagaatg

SEQ ID NO: 830 - DNA, 224 bp, Homo sapiens
  misc_feature (1)...(224): n = A,T,C or G
ctttaccaaatcctacaatttgctcatccatgagaggacccacacggacgagaggcctatcacgtgtgacatctgccacaagncttccggagcaagatcacctgcgggatcacagatacatccattccaaagaaaaacccttcaaatgtcaggagtgtgggaaaggattttgtcagtctagaactctagcagttcacaaaactttacacatgcngacattcagc

SEQ ID NO: 831 - DNA, 518 bp, Homo sapiens
accccgcgtccggggatgtggtaccggctgctggcggcggccggcagtagagcggtggccaggccgctggccttgctgtggcgatgtggtggcccaggaggcggcaggacggccaagaccagcgcgagggccctgggcaaggcccgacagaagaagctaggaaagctcatctggcctcctgttccagtgcttccaggggatccacgttcagaagctgactctgcaggcaagaccgacgttattttcctggtggctgtgttcaaaaccacccaaagggtttgagaaatactttaagaggagtggaaggaacacaaactgagaaacatcaacagcaccaaaaaaagagactggtgaactagagaatgctgagtctggaggagacggaggcaggagaggagggaagcaggataacgttgcctggtggaggcggatgcagaaggggggacttcccctgggatgacgaggatttccgcagtctgcccttttgggggcaggccgttgccatgggatttttctac

SEQ ID NO: 832 - DNA, 476 bp, Homo sapiens
  misc_feature (1)...(476): n = A,T,C or G
ccaaaaaatcanacactggtaaacaananaatgctgagtctggaggagacggaggcaggagaggagggaagcaggataaccgttgcctggtggaggcggatgcagaaggggggactccccctgggatgacgaggatttccgcagtctggcccttttgggggcaggcgttgccatgggatttttctacctctattttcgagatcctggaagagaaatcacgtggaagcactttgtacagtattacctggccagaggtctggtggaccggctggaagtcgtgaacaaacaatctgtgcgtgttattcctgcccctgggacctcttctgaactcattcttgaaaataaagacgcacacccttcccaagaatcaaattctaaactatgcaaccagtaaattccctaaagaatccaaaccaataacaagaacatangaccaaaaattccaaaggtaagacaagcaccaagatcttaaaaag

SEQ ID NO: 833 - DNA, 936 bp, Homo sapiens
  misc_feature (1)...(936): n = A,T,C or G
cgacccacgcgtccgggggatgtggtacccggctgctggcggcggccggcagtanagcggtggccaggccgctggccttgctgtggcgatgtggtggcccaggaggcggcaggacggccaagaccagcgcgagggccctgggcaaggcccgacagtggttatggccagtgagaatgtgccggtgttgcattgcagaagaagctaggaaagctcatctggcctcctgttccagtgcttccaggggatccacgttcagaagctgactctgcaggcaagaccgacgttattttcctggtggctgtgttcaaaaccacccaaagggtttgagaaatactttaagaggagtggaaggaacacaaactgagaaacatcaacancaccaaaaaaaggtaaaagggccagtttgaaaaatcagactgtgaagttttacagttgagtacttttaaagcattcactgaatgggctgatctccttgggaactgataagcaggtgggcctgtgagtgtgtgatggtgacatcgtcttccctgagcttgctcctgggcggtacccatccttcccaggtcaccagcaccttctcaaccggtttanatcctaagcctcgacaaatcatttaaaaattatatcatggtgtgatggtgtggactgggttttgggattggcgaantcagtatttttgtgttttcccctgtgaaaatgtctccttgcttgtttacccggtnaacattggggtgaaaaacacttaagtcatattgggaggtgtggtgacttgcctttcttacaaaaggaatntttctttttttttttttgagacagagtctcactctgtcacccaggctggagtgcagtggcacaatctcggctcactgcaagctctgcctcctgggttcacgccattctcctccttctccancctcagcctcccgagagctggga

SEQ ID NO: 834 - DNA, 727 bp, Homo sapiens
  misc_feature (1)...(727): n = A,T,C or G
gtcatttttataaatttttttagagacggagtcttgccacgttgcccaggctggtcttgaacttctgggctcaaganatcctctcaccgcngcttcccaaagttctggtattacagacgtgacccaccgtgcctggcatgaaggtgctatttctgacctcctgagtgtgacaagtagttctcttggattttccagctctttcttgtgaagtctggtgcccacccttctcctggttggcattctcgtctatgctgccaggaggggccttatgggatccaggcgcagtagacgaggagggggcctcttcggtgttggtgagacagcagccaagaatcttaaaaagcaacatcgatgtgttatttncagacgtagctgggtgcgaagaatcaaattggaaattatggaatttgtgaatttcctgaagaatcccaagcagtatcaggacttaggagcaaaaattccaaagggagccatgctcactggtcctcctggtaccggcaagacccttcttgccaaancaactncaggggaggccactgtncccttcatcactgtgaacgggtctgagttcctggaaatgattattggccgttgggccagcaaggggttcaaactctagccaccaacgtcggtggtggatggcttggcaccaaccgccctgacgtnctgggacccgggcnncatgcggggctggccnggcntcatcggccagaatttacactggtcc

SEQ ID NO: 835 - DNA, 870 bp, Homo sapiens
  misc_feature (1)...(870): n = A,T,C or G
nnnntnnnnnnnntttttaaaaacaaaatcagtctattaaacatgccctgaatatgctttgttcattctcatctttagcaacttgttcattttagtatgcttgcctggatatctgcgctccatcccaatgccaccccttccatgatggcatacctctgctatggagtctcgttcctcaccacagcaaccttctttccctaaacttcaataagcttaaatcttatcactcatttggcacatagcatattgtaccacaaatgctctcttccaagggaaatataagctcaccaacgtcaagttatagaagaaacactatgggaaacattattttaacttggttctactcaatagacatctgttcttgagcttcaccattattatcccccaaacccattatagaaatacaacagaaatattggcatcccaataggtgaagtattttctcttctcccagaaacatataatatccaaagttttctgtcacatatactcaaaacattttcttccaaccattttatctgtatttcagaagcatctttggtgtactatgttgggtccaacttctttaaattctgcagcagtgatccacatgtcctggaaggcagacaaggatgcaagaatagaacctcccatccacactcatattttcctttctggaggagctataacttgcacagcggtgttggcaggagccacctttgctatatccttaactaaccgcttgtctaaaccagggaaagaggttgatcccccggcaaggataatattggaaaagaaggaattcctcaggcctgtatcacatttcattatgctgctgaagcatatcttatcaatgccaggggcctcaagggtcatatgacacggagagaa

SEQ ID NO: 836 - DNA, 682 bp, Homo sapiens
  misc_feature (1)...(682): n = A,T,C or G
cgtggtctcctgggcaacgcttcccgcctttgagggaccagccggcccgaatagcccttcccccaaggccagaacccgtgggaaaccggaacccaggcgtctggcccccaactggggtaacaacctcccacgtcgtcccctagggaaaactgcgctgcactgggctgctgccgtgaacaacgcccgagccgcccgctcgcttctccaggccggagccgataaagatgcccaggacaacagggttagatgggacagagggcttcccacaaaacagtcaggcgcacgagagatggaaagtgcggtaacccgcaaagcctgaagggataggggccagtggtcgcgcaagtgaaggcagaaaggcccagtcctgtgggcgtggcattccctgatatcggccctggctcttctgtacaggagcagacgccgctattcctggcgggccgggaaggagcggtggaagtagcccagctactgctggggctgggggcagacgaagagctgcgggaacaggctgggctagcgccggcggacgttcgctcaccaacgtaaccactgggatctgctgacgctgctggaaggggctggngcaccaaaagccagtcacaaaaacacgacgggccgcgagtggggccctatcacgcgcgcacggacggtgtcagtaagagtgaacccgcatagaggg

SEQ ID NO: 837 - DNA, 550 bp, Homo sapiens
aagctgctgagcaccccgctgcacgtggcagtccggacagggcaggtggagattgtggagcactttctatccctgggcctggaaatcaatgccagagacagggaaggggatactgccctgcatgacgctgtgaggctcaaccgctacaaaatcatcaaactgctgctcctgcatggggctgacatgatgaccaagaacctggcaggaaagaccccgacggacctggtgcagctctggcaggctgatacccggcacgccctggagcatcctgagccgggggctgagcataacgggctggaggggcctaatgatagtgggcgagagacccctcagcctgtgccagcccagtgaatgcgtgccccagcccagccagctacccagcccctctctgtgtgcagccggagggtcctaagaatggctcccggagctaactgagggcccagccttttttctgcatgatccaggagcacataccacaaactaccacaataaaaaagctgtttttgctaaaaaaccaaaaaaaaaaaaaaaaaaaaaaaaaaaaaaaaaa

SEQ ID NO: 838 - DNA, 982 bp, Homo sapiens
gagagcttagatagagtgtatttttattcttttttttccatttccttttctcttttcatcttttttctttctttctttctttcctttttttcctttgtatttttatcttaacatgcctagacagagaagaacactggattgtacataatgggctttctttgactctcttttccagagtggaaataggattctgtgctccatcattctgagccatcaccaggggccgtccataatcaactatgatgatgagagtgggaagacatgtgtacatatcgcagcggcagcgggcttcagcgatattattcatgagctggcaagagtccctgagtgtaacctgcaggctctggatgtggatgacaggtatccatggtaaccagaaagtgctgggaaactagtcatttccccctaactgaatcttaaaataaaggagatgtttaaggaggtgtcctatacagctatatccctattgccagtaatacacatgggcttgtgacaataaaaattgctctattttagtgagaggagaaaaaattattgttatggagaggaagactgcgactgtacagtgttgtcagattttccactttttgctaaatgttctctgtgttctcagaagacgttctgtatttcagcttcctgctatgtgccctctttgttcctaaaggacacctctgcactgggctgcagctgcagggaaggccgaatgtgtccagtcactgctggagttgggaatggacagcaacctgcgggacatcaatgagagcacgcccttggcctatgccctgtactgcggtcacaccggcgtgtgttcaaactcctctcccaagagagcagaacagagcctactcgaccccctccctcccagagcagtcggccccagaagaaggagagacggtttcaacgttgctcaaccaaatatttcttgcaaaaacaaggaaggaaggagcagagagcccatcagaagggagtttccccggcaggg

SEQ ID NO: 839 - DNA, 800 bp, Homo sapiens
aacccgtctacagaggaccctcagccagagcagaaagctcctgagccagctcccttggatggactcccagaggcctgagcccagagaggaggaggaggaggaacaggaactgcggtggatggagctggactccgaagaggccctgggaaccaggacagaggggcctagtgttgtccagggctgggggcacctgctccaggccgtgtggaggggccctgcaggcctggtgacgcagctgcttgcggcggccgccctaggccgatcccaggacattgaggtgctgctgggccacggggcagacccaggcatcagggacaggcatggccgctctgcgctgcacagggctgccgcccgaggacacctgcttgccgtccagttgctggtcacccagggggccgaggtggatgcgcgggacaccctgggcctcacacccctgcatcacgcctctcgggaaggccacgtggaggttgccggctgcctgctggacaggggtgcccaggtggatgctaccggctggctccgaaagacccccctacacctggctgcagagcgagggcatgggcctaccgtggggcttctgctgagccgaggggccagccccactctgcggacgcagtgggccgaggtggcccagatgcctgagggggacctgccccaggcgctgcctgaacttggagggggggagaaggagtgtgagggcatagagtccacgggctgagccagacagcaggctccaggctccaccgccccagtgatttccaggctctctggctgaggctgcctgcctggaggggacatca

SEQ ID NO: 840 - DNA, 1219 bp, Homo sapiens
ttttttttttttttttactttaaattttagaaatgtttattttagaaacacacaaagctaaaatgcatatttcagtccaacaacctagagagaagaaatagggagctacatgtttttgtttagtcttgttttttcctcaaaatccatccctaagagtcaggagctacaagtttataggtacgcatttgtatgaatatgcttgccatgattctaagacctagaacatctagaatacaggacattacatttttatttgaaaaaatatttaaattaattttacatgtacaatataatatcactttcagaacaaaaaaacattaatgaaagtagaatatactaaaacaaaattatttttacttttgagtcaaattctacaccctggaaaaagtcagaagcccatactagagttttgtagaagtttttttaaaaatgcttttaaaatttagcaaggctgcaaagtctgtcaataaataaatcaaattactatctgtcagtaagctatgaagtccacagtaagtaccaatgcaaactgaacagatttagaaagtcaatccatactttctagcatcatcatgaaaactccatgactgaccgacacatcatttccaatgttatcatcaaggcctcagtgtgtaccccaggacacactttcaaattctcaggcagttccttaagaatgtgtgggagtttctgcaatgtctttatatttccagcataaagatccagtaaccagtcagtatgaacactggtggtttctttatgacttttacaagccataagcagttcatttagatgagttaaccctttggaagctaaaatgaactctgaagataaatcaaaaattgaacaaaaatttagcaacatcctactaagtaaaaaggagccaaattcaagttgctggtaatgaaaatgtttctctgcttgtgcatgaaagttctccactgtatcttctatttttgtaatagcaaacagttcttctttgatttgaggtgaaaccacataatccaagggcaattctcccttagcattcctctgttgtaaaagcactgggcccccaaaaagaaaaagcaaaatgccaaaatcaaaacatccctattacagcacatcatgcaaaggagtcaccccgtccacttgagtgagcagatctacctctggacaacgttgcaaaatttcctggacacacactgtgttgccatagttacaggcttcatgcaaaggc

SEQ ID NO: 841 - DNA, 1069 bp, Homo sapiens
  misc_feature (1)...(1069): n = A,T,C or G
acatctttaatccatctggagtttactttgttctaaggtgcaaggtagatgttttccttttctgacactttaaatgagctgtaaacttagaatttcagacctggaaatgatgttacatttctactagtctaccttatgtctttagaactgaaaaaatctgagaaccaggaagttccagtgacttgttccagttcagatagctaattaatgacagaaccacagttagatttctgtttgctctcttaatttaatacttttgcaacattccaatggcttgcttatagagcaggccatctttagtcatctcctttatgttcctttatattgcttacatcacattttataatcattatacacatttacatattttgcttatatgtgttgtatttcaaagagttttaagagaatcttatttttcactccccaaccctcaccccccttactaccatgganatctcgtncataagctaccaaattgtaaaagaacttngctttgtgatgagatgccttccataaagcttggntccatcttccaaatagaggttagtcactcttctctctctctccccttcctagagggtatctcattaggtaattcagaggcagacagacaattgctggaagctgcaaaggctggagatgtcgaaactgtaaaaaaactgtgtactgttcagagtgtcaactgcagagacattgaagggcgtcagtctacaccacttcattttgcagctgggtataacagagtgtccgtggtggaatatctgctacagcatggagctgatgtgcatgctaaagataaaggaggccttgtacctttgcacaatgcatgttcttatggacattatgaagttgcagaacttcttgttaaacatggagcagtagttaatgtagctgatttatggaaatttacacctttacatgaagcagcagcaaaaggaaaatatgaaatttgcaaacttctgctccagcatggtgcagaccctacaaaaaaaaacaggggatggaaatactcctttggatcttgttaaagatggagatcagatattcaagatctgcttagggggagatg

SEQ ID NO: 842 - DNA, 466 bp, Homo sapiens
ttttgtggggagggaggacatacaggaatgtgtatctgaataaacccatagatgttctagcaaaaattagatatagaaaaggttacctgcaggacaattcttaagcatagattataaggaaaaaaaagtaatacttatgagaaagtaaatagtttaggaagtcaggcatttcacctgctaaataaaaaataactcattggattaccaaagattaccaaaaaggaagtatacctttgcttcatgtttcaccactacttcaacaacatcattatgagctttctcagatgccacgtgcagaggagtcaagaatcttagagagaaaaaatcagccagacagtgaatatattttccaaaagagtaaaatctcaatggatatttaatcattaaaatgtatacttactctttagtcttttcattgatgtttgctccttttcttagcaacagttcacatatttggctttctttt

SEQ ID NO: 843 - DNA, 542 bp, Homo sapiens
aggtaaggatataactttatttttttccaaataaatagatgtctcatatgaactaatttagaatatgatcatctgtccagtcttaaacacttttagccacaccaaatctactccctcgcttccacagtgaccagactggggctcttcctgggtggtctggcctcagttccctgcaggaggagggagcagatgtccccgtgacccctctcagcagccttatgcagactggtcatgccgtcgtcatccaccaccctggggttggacccatgtgatagcaggagccgcacgatttcagtgtgcccgcagtagctggctcggtgcagagcagtggcacccccgtgggtctgggcatcacacttagctccgctttccagcaggaactggcacacagcgtagtgcccattgcggctggcatagtgcagcgcagtgtagccggccgagtcgggctgacttgggtcctcggccttctggattaaatgcttcactcggcccaggtctccattcagggctgccgaccagattcccctctcgaagtccatctc

SEQ ID NO: 844 - DNA, 404 bp, Homo sapiens
ttttttttgaggtaaggatataactttatttttttccaaataaatagatgtctcatatgaactaatttagaatatgatcatctgtccagtcttaaacacttttagccacaccaaatctactccctcgcttccacagtgaccagactggggctcttcctgggtggtctggcctcagttccctgcccagcagcatggatgctgaccaaggcagggctgtgttgcaggaggagggagcagatgtccccgtgacccctctcagcagccttatgcagactggtcatgccgtcgtcatccaccaccctggggttggacccatgtgatagcaggagccgcgcgatttcagtgtgcccgcagtagctggctcggtgcagagcagtggcaccccccgtgggtctgggcatcac

SEQ ID NO: 845 - DNA, 905 bp, Homo sapiens
gcggccgcgtcgacgttttttttgtgtttttatatttagatctttaatcttgcaatttatctttgggtgtgggatgaggtaaggatataactttatttttttccaaataaatagatgtctcatatgaactaatttagaatatgatcatctgtccagtcttaaacacttttagccacaccaaatctactccctcgcttccacagtgaccagactggggctcttcctgggtggtctggcctcagttccctgcccagcagcatggatgctgaccaaggcaggggcttggagaactggtctgtgtaccctttaaaggcagctggagatagggtggcggctcagctggatagcaggtcccgcaggtcactgttgcaaggcagcaggtcacatgctagccgtgcctttcggtcccggatggccttcagggctgggctgtgttgcaggaggagggagcagatgtccccgtgacccctctcagcagccttatgcagactggtcatgccgtcgtcatccaccaccctggggttggacccatgtgatagcaggagccgcgcgatttcagtgtgcccgcagtagctggctcggtgcagagcagtggcacccccgtgggtctgggcatcacacttagctccgctttccagcaggaactggcacacagcgtagtgcccattgcggctggcatagtgcagcgcagtgtagccggccgagtcgggctgacttgggtcctcggccttctggattaaatgcttcactcggcccaggtctccattcagggctgccgaccagattcccctctcgaagtccatctcctccagcgtctgctgtacgccgagcaccgcgctgggatgcgagcagcagggcccgtccgcgcagggccgaggcgtcgccatcccggccccggcggccgc

SEQ ID NO: 846 - DNA, 481 bp, Homo sapiens
  misc_feature (1)...(481): n = A,T,C or G
ccccgcgtccgccccgcgtccggtcagggtggtggaggaaaaggcgctccgtcatggggatccagacgagccccgtcctgctggcctccctgggggtggggctggtcactctgctcggcctggctgtgggctcctacttggttcggaggtcccgccggcctcaggtcactctcctggaccccaatgaaaagtacctgctacgactgctagacaagacggcaaacatatctacctctccacccgaattgatggcagcctggtcatcaggccatacactcctgtcaccagtgatgaggatcaaggctatgtggatcttgtcatcaaggtctacctgaagggtgtgcaccccaaatttcctgagggaggggaagatgtctcagtacctggatagcctgaaggttgggngatggggtttgggagtttcnggggccaaagcggggtttgcttcacttacactgggaaaaggggcatttttaacatt

SEQ ID NO: 847 - DNA, 518 bp, Homo sapiens
tttttttttttcactgggtctgtgcactcaaacttccgagttggcagtgtgaggcaaggttgatttcaatgaagccagaattcacaaaggggcaaggctttgattttgacgatgaggggatagtgggatgtccaaaaatgggaaggataccttttgggggatgatccaaagtgaaccaaagcttaaagcgattgggatagcgggcctgcagttcctctaagtcctcccgcaagatgatatccttttctgtctggttggcaaaaagcaaaaagcactgggttggatcttcagggactttcaggatggcccggatcagctgtagcattggggtgattcctgtcccgccggcaatcattcccagtttcttcgccactcggggttctggtggagatttcttgttgggctgaatgttaaaatgcccttttccagtgtaagtgagcaacccgctttggcccccgaaacttcaccacattccccaacctttaggtatccaagagtggagaaacattcctccctcc

SEQ ID NO: 848 - DNA, 1660 bp, Homo sapiens
  misc_feature (1)...(1660): n = A,T,C or G
taaaggatccagacggtaagaccctcattcagtatcctccactgggggacccctccccatctggttctggccactcagctccggaccaggggctgtcgctgccgaccccgccccgcagggctctgggcccaccgtggatgctggggtcccgatcccgcacatccgggctcgggactccgccaggttacccctctgcccttggcatgcctccgcgctggagctcgggatcgccacccctgggacggtcacccgcccggtcggcttgtcaggtggtggaggaaaaggcgctccgtcatggggatccagacgagccccgtcctgctggcctccctgggggtggggctggtcactctgctcggcctggctgtgggctcctacttggttcggaggtcccgccggcctcaggtcactctcctggaccccaatgaaaagtacctgctacgactgctagacaagacgactgtgagccacaacaccaagaggttccgctttgccctgcccaccgcccaccacactctggggctgcctgtgggcaaacatatctacctctccacccgaattgatggcagcctggtcatcaggccatacactcctgtcaccagtgatgaggatcaaggctatgtggatcttgtcatcaaggtctacctgaagggtgtgcaccccaaatttcctgagggagggaagatgtctcagtacctggatagcctgaaggttggggatgtggtgggaagtttccgggggccaagcgggttgctcacttacactggaaaagggcattttaacattcagcccaacaagaaatctccaccagaaccccgagtggcgaagaaactgggaatgattgccggcgggacaggaatcaccccaatgctacagctgatccgggccatcctgaaagtccctgaagatccaacccagtgctttctgctttttgccaaccagacagaaaaggatatcatcttgcgggaggacttagaggaactgcaggcccgctatcccaatcgctttaagctctggttcactctggatcatcccccaaaagattgggcctacagcaagggctttgtgactgccgacatgatccgggaacacctgcccgctccaggggatgatgtgctggtactgctttgtgggccacccccaatggtgcagctggcctgccatcccaacttggacaaactgggctactcacaaaagatgcgattcacctactgagcatcctccagcttccctggtgctgttcgctgcagttgttccccatcagtactcaagcactataagccttagattcctttcctcagagtttcaggttttttcagttacatctagagctgaaatctggatagtacctgcaggaacaatattcctgtaagccatggaagagggccaaggctccagtcactcccttggatggcctccctaaatctccccgtggtcaacaagggaacagtgaagcagggcccccttacaaggtcatccacataaaaagttaactcaccactctaacggattctttcaaagaaatcactaagcttcaccngattanccaccccaaatncacacccccttntgttgttcttgtgnatgtaaaagggaancagttttgtggcaatggggtttttactttaaacttttnactgtttcaancccattgtggctt

SEQ ID NO: 849 - DNA, 2404 bp, Homo sapiens
gcgtccgcttgacaagtcagaacgcttgaaagcagggaaatccggatgtctcggttatgaagtggagcagtgagtgtgagcctcaacatagttccagaactctccatccggactagttattgagcatctgcctctcatatcaccagtggccatctgaggtgtttccctggctctgaaggggtaggcacgatggccaggtgcttcagcctggtgttgcttctcacttccatctggaccacgaggctcctggtccaaggctctttgcgtgcagaagagctttccatccaggtgtcatgcagaattatggggatcacccttgtgagcaaaaaggcgaaccagcagctgaatttcacagaagctaaggaggcctgtaggctgctgggactaagtttggccggcaaggaccaagttgaaacagccttgaaagctagctttgaaacttgcagctatggctgggttggagatggattcgtggtcatctctaggattagcccaaaccccaagtgtgggaaaaatggggtgggtgtcctgatttggaaggttccagtgagccgacagtttgcagcctattgttacaactcatctgatacttggactaactcgtgcattccagaaattatcaccaccaaagatcccatattcaacactcaaactgcaacacaaacaacagaatttattgtcagtgacagtacctactcggtggcatccccttactctacaatacctgcccctactactactcctcctgctccagcttccacttctattccacggagaaaaaaattgatttgtgtcacagaagtttttatggaaactagcaccatgtctacagaaactgaaccatttgttgaaaataaagcagcattcaagaatgaagctgctgggtttggaggtgtccccacggctctgctagtgcttgctctcctcttctttggtgctgcagctggtcttggattttgctatgtcaaaaggtatgtgaaggccttcccttttacaaacaagaatcagcagaaggaaatgatcgaaaccaaagtagtaaaggaggagaaggccaatgatagcaaccctaatgaggaatcaaagaaaactgataaaaacccagaagagtccaagagtccaagcaaaactaccgtgcgatgcctggaagctgaagtttagatgagacagaaatgaggagacacacctgaggctggtttctttcatgctccttaccctgccccagctggggaaatcaaaagggccaaagaaccaaagaagaaagtccacccttggttcctaactggaatcagctcaggactgccattggactatggagtgcaccaaagagaatgcccttctccttattgtaaccctgtctggatcctatcctcctacctccaaagcttcccacggcctttctagcctggctatgtcctaataatatcccactgggagaaaggagttttgcaaagtgcaaggacctaaaacatctcatcagtatccagtggtaaaaaggcctcctggctgtctgaggctaggtgggttgaaagccaaggagtcactgagaccaaggctttctctactgattccgcagctcagaccctttcttcagctctgaaagagaaacacgtatcccacctgacatgtccttctgagcccggtaagagcaaaagaatggcagaaaagtttagcccctgaaagccatggagattctcataacttgagacctaatctctgtaaagctaaaataaagaaatagaacaaggctgaggatacgacagtacactgtcagcagggactgtaaacacagacagggtcaaagtgttttctctgaacacattgagttggaatcactgtttagaacacacacacttactttttctggtctctaccactgctgatattttctctaggaaatatacttttacaagtaacaaaaataaaaactcttataaatttctatttttatctgagttacagaaatgattactaaggaagattactcagtaatttgtttaaaaagtaataaaattcaacaaacatttgctgaatagctactatatgtcaagtgctgtgcaaggtattacactctgtaattgaatattattcctcaaaaaattgcacatagtagaacgctatctgggaagctatttttttcagttttgatatttctagcttatctacttccaaactaatttttatttttgctgagactaatcttattcattttctctaatatggcaaccattataaccttaatttattattaacatacctaagaagtacattgttacctctatataccaaagcacattttaaaagtgccattaacaaatgtatcactagccctcctttttccaacaagaagggactgagagatgcagaaatatttgtgacaaaaaattaaagcatttagaaaacttaa

SEQ ID NO: 850 - DNA, 481 bp, Homo sapiens; identical to SEQ ID NO: 846
  misc_feature (1)...(481): n = A,T,C or G

SEQ ID NO: 851 - DNA, 518 bp, Homo sapiens; identical to SEQ ID NO: 847

SEQ ID NO: 852 - DNA, 1660 bp, Homo sapiens; identical to SEQ ID NO: 848
  misc_feature (1)...(1660): n = A,T,C or G

SEQ ID NO: 853 - DNA, 2404 bp, Homo sapiens; identical to SEQ ID NO: 849

SEQ ID NO: 854 - DNA, 713 bp, Homo sapiens
  misc_feature (1)...(713): n = A,T,C or G
ccacacaccccactactcccttactcctgataacacccacttcatactaggaaaaaggcatctaactaccatacaagttcagaccaatggaagaaaagagcagcaaaaattgaactgaatgaatcccaaaagcaagaaattaaagacgcctttaatttatttgatattgatgggtctggaaccatcgatgtaaaagaaggaaatgcttgatgaagctgatcatgatagagatggagaaataaacgaggaagatgttttgagagtgatgaaaaagactactcgttattaatagcgttgttttagtccttgtggaaaattaacaaatttgtatttgttatgcanttttataaattaatatctgaatgtattcattttcagtttttagtttatatgtacacattggcttcttgatgtctaatccatgtaagaagttacacatctctaccaatatgatgttaaatntacagcatcaagaaacaaaacataatgacttctttgagccattaatccaagaacagtattgattctagctgctcttttgagaaccttaggtcacaaagacttagaattttaaagtttgatgaagttggcttcacatccaaatgaatttggcaaacaaaacttatattttccttttgtgcaacccaaaaaaacctgatgaacatttgctttttagtcagttactcaaatacataaagtattaaaaaaaaaaa

SEQ ID NO: 855 - DNA, 1049 bp, Homo sapiens
ttttttttttttttttgcccagcaaagacaaatatatttgtccctgttgctacaataggaagttaacaatctggcaagatatctgaacacaagcaaatgaaaacagttcacctaacacccatgcaaattataaatttcctcccatatacaaaatgatgagaaataacagcaaaaatgtatactttcttatttttgaacttttaaagttctagtttggtctttgaatcaaaacaaagtaaaagatgtttataaaagccatttccttttctttccccactatgctcatttgacttgctcttccccctatagggtaccctgagtcattcagagaaggagaattaatagcactgagttggtgatgaagctcctgttaggacatatggcttcacaaaaagaaatacttccagataagtcagagagacagttggacgtcttgagcaaatcttgaaagagatagggaagaaagcagaagttgttgggtggtgcttgtaagaaaaaggctcatacgatgaggaccagcttcttgtggatctccaggtctctgaccacagcactgaattcctcaaaggatatcttcccatcgccatccttgtccaggatgatgatggttttgtcgaccagctgctggagctgccagtccgtcaggttgttgcccaccatcatcttcagcacctggaagagctccccgttggaaatgtagccatctttatccatgtcgtaaatgctgaacgcaaacctcaacttctgctcctcgtcgcccttgacgctgaactgggaggtccccaggatgaattccttgaagtccacttctccatcaccgtcggtgtcgaagacgtcgatcactcgccgcaccaacgggttgtggcgcagctccggcagggacatgaactcctccacgctcagagaccctgatttgtccaagtccaacttcttaaacctcctgcccagccttttaatttcatcattgtcaaagtgggagcacatctccgccgggtaactggcctcgtttcccattgtggacatctggcaacggccacggctcaaagggt

SEQ ID NO: 856 - DNA, 701 bp, Homo sapiens
tttttttttttcttatttcttcaaatgtttttattggatttaaaattcatttaaggggtatacagatatacaactagtttgatcagctactaatatattttggtgtccctttatttttgtacccaagagccagttcactttttctccatgttcaatatttagctttggtaaaatgttgccatgttcttcctcatctgttactgaagcgttagtatttccaccctgcttggtgcaagttcctcttttaggtttcttcctgtgggtacgttttgtgggactcttctgttttttctcaacttcactgtttgcatcccacaacgtgatcttcccatcattccctccagtaagcagcaaataggattctgggagaaagcagacctgggatacccctgaagtgtggcccttaaatcccagttcctgttcacacttaactcccatcacccgaaagattcgaaccttaccatcttctgcaccacaactaaaaatattaccacacgaagccacagagatagaatgggctagggcagggtttaagagctgaccaggtgactgtgggccttccatttcttctgtttcatcctcctgtaaatttgtaatccagagtggtcgggctttttgaagactccacagcatcacctgcatatccagtccacatgacaccaggctctgaggcctctgaggccgaaaagccggacgcgggg

SEQ ID NO: 857 - DNA, 450 bp, Homo sapiens
  misc_feature (1)...(450): n = A,T,C or G
ggagtcaaacctcgcccgggagggaccagttttcctagatgcaggacgacagcgtccatagtttcacgttcgaagcaactggtggcaaaaggttagcatttaagatggcagggacagcgcgccatgaccgagagatggcgatccaggccaagaaaaagctcaccacggccaccgaccccattgaaagactccgactgcagtgcctggcccaggggctcctgctgggatcaaaggacttggcagagtgtttagaattatggatgacgataataatcgaacccttgattttaaagaatttatgaaagggttaaatgattatgctgtggtcatggaaaaagaagaggtggaagaacttttccggagtttngataaagatggaaatggaacaatagacttcaatgaatttcttctcacattaagacctccaatgtccagagccagaaaagaggt

SEQ ID NO: 858 - DNA, 801 bp, Homo sapiens
  misc_feature (1)...(801): n = A,T,C or G
tnnnngngncngnatgcagncagnagggtctggccgaaatcccttcccatttacctcctcagactcgaacgctgnatttacaagataatcagatacaccatcttcctgctttgggatttagggggactaacagacggaatcatctgtgaatcaccagacacctggaagggaaaggacctccttaggatccctcatgagctgtaccagccctgccctcttcctgctcctgatccagtgtcctcgcaggctcagtggcccggttctgcccacggtgtggtcctgaggcctcctgagaaccacaacgcgggggagcgagaactcttggagtgcgagctcaaacccaagncaagggcggtcaacctgngtcatgncattggcactgtcatcatcactggggtggngtgtgggattgtgtgtctcatgatgttgggaggtgccatctttggntgaactatgnggaatcacaggccaggaccatggggnccctggttcaaacaatatcntggnagntggagaaaagnggattggcagtcacagcnnaaagtttggntaattggttggcaatgaggcaaaattggnttattnggtttttttctnnagctttttggttggnaaaaaaaaggttcttggttncccganaatanaaaaaaaagtncncaaaannngggnnnnntttttaatntnncnncttnaanntnncntnnnncccnnnnnnnnnnncnnnnnnnncncnnnctcnncncnccctccctctncnnnnnnnnncnctcccnncnnctcncnntcctnnncntnnncncc

SEQ ID NO: 859 - DNA, 1416 bp, Homo sapiens
cgtccgagaaaagcaagggcagggttcagaaagactgaatgtaaagctgggctctgagtctgccatgcccttcgtgtgttgctctgcacattaattaaagggtctacgaggtcagcaaggacgcccaagaagactcagtcatgaaaggtgaactgctcctgttttccagtgtgattgtcctgctccaggtggtatgcagctgcccggacaagtgttactgtcagtcatctacaaattttgtagactgcagccagcagggtctggccgaaatcccttcccatttacctcctcagactcgaacgctgcatttacaagataatcagatacaccatcttcctgcttttgcatttaggtcagtgccatggctcatgaccttaaacttgtccaacaattccctttcaaatctggcccctggagctttccatgggcttcagcacttgcaggttttaaatctaacccagaattcactcctttccctggaaagcagacttttccattccctccctcagctgagggagcttgatttgtcatcaaacaacataagccaccttcccacatccttgggagagacttgggagaacctaactatacttgcggttcaacaaaaccagcttcagcagcttgatcgagcgctcctggaatccatgcccagtgtgaggcttttacttctcaaggacaacctctggaaatgcaattgccacttgctcggtcttaaactctggctggagaaatttgtctataaagggggactaacagacggcatcatctgtgaatcaccagacacctggaagggaaaggacctccttaggatccctcatgagctgtaccagccctgccctcttcctgctcctgatccagtgtcctcgcaggctcagtggcccggctctgcccacggtgtggtcctgaggcctcctgagaaccacaacgcgggggagcgagaactcttggagtgcgagctcaaacccaagccaaggccggccaacctgcgtcatgccattgccactgtcatcatcactggcgttgtgtgtgggattgtgtgtctcatgatgttggcagctgccatctatggctgcacctatgcggcaatcacagcccagtaccatgggggacccttggctcaaaccaatgatcctgggaaggtggaagaaaaagagcgatttgacagctcaccagcctgagagcttttgtctcaaataggattggtcattgcaggccagaagatagtgtctgagtagggctgatgtgtttcctgttagtctgattttgcttttgccaaaagacaaaaaaaaaaaaaaaaaaaaaaaagaaaaaaaaaagatgtgtctgtaaaaaatatttctggggaggaatttatgttgcgatttttaaaatactataggtaaaataaagatgatacttgtgaaaaaaaaacaaaaa

SEQ ID NO: 860 - DNA, 665 bp, Homo sapiens
tttggggggaaaaagtcagtttatttgatgtgtttcttagtaatggaattgtggggaagaacaaaagcgggctctgggactcacattgctttgggggaggctcaagcttcccagaatcccttgtccctccccactttgggcacttaggggtggggctggggagtgagagggacaaggcagggcatgattgattaaagctaacgagcagacagaaggcactggtgggtcacatctcgggcctgggagagggagggcgttggccaggccccatgtgacaccaggggctccttggcatccaggcttggcgtctagtcctttcccttccctttcttggctttggcctttgctttggtcttgggggtgcagggcttggtgacgcggatggtctcctggcactgagcattgtagcgcgccttctccagggtgccttggcgggctttggtgcctgtgcccccatcacacgcaccccagttctcaaaccttgtactttgcagtcggctccaaactccttcttccagttgcagggcaccctgcaccggatgcgcttggtcttgggccccgcaggtggcccttgcggaaacccaccccccaatccttgctgctgggggtgcagggcccccaggcccactcagcgcactcgctccccgggccgccctcggacgcgt

SEQ ID NO: 861 - DNA, 519 bp, Homo sapiens
cctttttttttttttttttgtgtttatcacctttaaagaagaagaacccgtgaagaaggttctggagaaaaagttccatactgtcagtggaagcaaggtaaggtgttcccagctctgcttggcctcctgtgctgctggagagctggcccttagagggatgggttaggggttgggcctcatgcaggagctctccaggttggtcagactttactatttctctgaagcgtatgctgccctgattggggcagtgttccaatccttgaaagacttcccaggctgggaggactgccaataaacaacacaggatgtgagggaggtaggagaaggtggcctctgtgaatagagcaggttgagtagcctctttagctcctcacttaaagctagaggtgacagttctagattcttgagtccaggggtatgaagcctgcagtttaaggtctcagaagatcctagaacttcttgcaactaactgattctcctctgtggtgaagtttttcttattccagagcctttctacct

SEQ ID NO: 862 - DNA, 1647 bp, Homo sapiens
  misc_feature (1)...(1647): n = A,T,C or G
gcagctggaagagcctgctgcaggagaaagccccaagttcagggcacctggcacccccccccgcctcccttgaccctgancaananntctcannnnnnnnnncccacactcacccatttttgggggtttttaaattttatttcaaaagcttggatagcttcaatatccaggttgtggcaaaatcaggacacgtgtaaaataccttacaatacattagattcccaaaaggtaccaaaaagtacagtaaaattaacacttccgttacaggaaatgtatgacgcaaataatataaaattaaaaggtgaaaaaaaggtgacactggtttcctaagatacaatttactctttacaaccagggtccacaggtccaggctgcagagcggcagcaggaagcagagcctcccacctgcttctgggggacctggtaataaaaatcagcccatgatggcgctatggcctctcagacaccacacgctgcctaaacacctagagctctggaaatagtcaacaggagagtgatttccatgggggaaattttaaataagatgcacatgggacaggcaatagaaagtttgccaagttaaatttggtacataattgtgttcactccaatatccaaacaaagcatgtgtgcgatcaagttggtcgctcctggtgccgcctcagtatggcttgtagttaccctgatcccaaccacgtcgcctgctcttgccgtagtttgtactaccctgacctccacctccaccaaccacctccgcttgcctcggttccctcggttgcggtttccacggcccccagagccatactgctgctgctgatagacttctttgggctgggccaccttgatctcacacttgcttccactgacagtatggaactttttctccagaaccttcttcacgggttcttcttctttaaaggtgataaacacaaaacctcgtcttttgttcaactttggatccattggcaattcaatggcctcaatctccccaaactcgccaaagtactccctgatcttttcctcagtggcttcaggattcagacccccaacgaagattttcttcgccgggtccttcttcatagccatggcctttttagggtcaatgacacggccatccagcctgtgctccattctggtctaggaccttctccacactnaccnaatcttttaacaatataaacccaaaccctctcaacagcccacagatacaatccatactcatcctacacccctccacaccacgccnctnnnccntanctcctnccntncacnttnnnnanccnntacatncanntnnnaanctccacacnnananncncnccncccccntnatannnctttacctnntacatcnncatnncanaaccaaancaaaannntgtagcncntnccaaannccaacnctcanaaaccntcananntcnncantnatncattttccnataattntcnnacnnnnnnnnnnnnnnnnnnnnnnnnnnnnnnnnnnnnnnnnnnnnnnnnnnnnnnnnnnnnnnnnnnnnnnnnnnnnnnnnnnnnnnnnnnnnnnnnnnnnnnnnnnnnnnnnnnnnnnnnnnnnnnnnnnnnnnnnnnnnnnnnnnnnnnnnnnnnnnnnnnnnnnnnnnnnnnnnnnnnnnnnnntttaag

SEQ ID NO: 863 - DNA, 461 bp, Homo sapiens
gagtacgagcgctgccactggcccgcgacggaacggggcgaaaaggcggcggcaccatgttctccctcaagccgcccaaacccaccttcaggtcctacctcctgccaccgccccaggagaaattgtcgtaaatgaagtcaattttgtgagaaaatgcattgcaacagacacaagccagtacgatttgtggggaaagctgatatgcagtaacttcaaaatctcctttattacagatgacccaatgccattacagaaattccattacagaaaccttcttcttggtgaacacgatgtccctttaacatgtattgagcaaattgtcacagtaaacgaccacaagaggaagcagaaagtcctaggccccaaccagaaactgaaatttaatccaacagagttaattatttattgtaaagatttcagaattgtcagatttcgctttgatgaatcaggtcccgaaagtg

SEQ ID NO: 864 - DNA, 261 bp, Homo sapiens
  misc_feature (1)...(261): n = A,T,C or G
acgcgtccgacntgcngaagttntnncgggcncnggagcancactggtggatcggcctgcacacnnntganagcgatgggcgctnnanatggacagatggtgccattntaaacntcatntgctgggcnccangnnaacctnggnctgtnggcaaggacacgangagngtgtacatgacanccngncnngaggactggngggaccactaggtgcctgacagccttgccctacatctgcaagcgcagataacgtcaccaaagg

SEQ ID NO: 865 - DNA, 467 bp, Homo sapiens
agaataaaaacatttcagctcaaattttatttagttaattactattattattcttttttgtagcatcggagtcttgctatgtcactctagctggcctcaaactcctggcctcaagcgattctcttgcctcagtttgcaaactgctgggattacagacatcaccatgccaggccacaacccaaacttgaaaaagaaaatctaagtggccttagaagagtttgcaagtcagctgaccaatgtggtacctccttaaggagggcctctgaggcccgatgaaaaaggcttatataaaaggctcatgaccagctctgccagtgatgaacatgtgtcaagtcgttctgctgtccccaactcccggacccaggtggctctgaattagcttcagctaataaagaacaaagacggggggcagaaaggctccccaaacttgtgcaaatccagtgagaaaacactttgcagacgcgggg

SEQ ID NO: 866 - DNA, 396 bp, Homo sapiens
  misc_feature (1)...(396): n = A,T,C or G
nggagggccctctggacactgtggcagtgattngaattgccacaaaacgggcccccatgcagtgccaaggttatgtggcattgctgggcagtgatgaccagagctggggctggaatctggtggacaataatctactacataatggagaagtcaatggcagttttccacagtgcaacaacgcaccaaaatatcagataggagaaagaattcgagtcatcttggacatggaagataagactttagcttttgaacgtggatatgagttcctgggggttgcttttagaggacttccaaaggtctgcttatacccagcagtttctgctgtatatgggccaacacagaagtgacttttggtttaccttggaaaaccttttggacggatgacaattggctttt

SEQ ID NO: 867 - DNA, 2846 bp, Homo sapiens
  misc_feature (1)...(2846): n = A,T,C or G
nnttttttttccttgtatgaaaagatttaatgaattatgagccattgatcattacaaactttaagccttaatatttcttctttcctatgtaaaaccaggtaattaaaacagcctgtctcagtatgacagaagaccatagtagggataatagtaacgtctgcttccacatctgcatgcttcgttaaccaaccaaagaaagtgctccaggtttcccaagtcaacaaagtatactcagttacactttccctgatcatactatgaattgaaacagaacactcctttgacttttaatagcacttttcatccacggcacaagcactttcccattattttctcctttaccctcaatatccttgtgaggtagtgaagggagggagcaaggatttttttttttctattttgcagatgagaaaactcaaggtgaattttacaacagtggttctcaaccttggcagcatattgaaatgaccagaaagtttttaaaaatccttatgaccagctcatattccagaccaacatcagaatcttggcatacggaacccaagcatcgatgtgtcttccaacattccaaagtgactacaaagtgtatacagccaacactgagaaccactggtttgaatgatttacactcaatcttcaggcgcaactgtcttctaccgaaatgctctcctcagcaccaatgacaaagatattccatctccttgagcactgcagcagtttaagattttgtagagctactactgggttttagtgacaaatttacgtaaatgaaggccctcatgacccagatgctcatgctgctcacttcaattgcatatgatttgcgaatgggacattcgggaatttaaatctttgagataagaatggcttgttgttaaatattgaggcaattatttcattctaggtccaatacgcaataaccatgtgtttcggttttccactcagcaccttcaaaactgttgcaaatgaatgtttactaacaagacaaaagagacaattataaaccaaactctcaacaaaattcggaatggccacatcacaacctgaaaaagaaacaagtacttaaaggacttgatcacttcctaacaagtccatcttcaacctgaaccacttctcttgtttaatcaaattttaaactttgccgaactgagttgttctacaccaagnaaaatcaatttctataccacctacattctctaatacatttaacatataatttcactcaatacaaggaggtttcttcttaacctggacatcgaaaagaatctttaacagatttcatcttttcaagcaatgtatcaaatacacaataaatacttgtaaacttttcaggtggcaacaataaatctttgttctatggctgaaatcccttgcttcacaggagtattgacaatcttaactcccaaggagcaatccaagaatcccggccagctgctgggtgtccctaatcagatttaaaacaaaacatacatacagcaagaactcagaagtacaaagatttcgctcgcttttgtcaattcttatgtatctaaaaccatacaatttatactttcatacagaaagatgtctgtttcttttctaacaaaagaaaaactctcagctcatgtgggttggattattaattcaaaagcattttagtgatgagaaacaagatttgtaagtcaaaataggagttaatgttaaactcttctacaacgaaaccttcaaatattgccaacctgaagttttcagcacaaggtgttgtatttcaagtcccatgggggcaattatctataatgagattaagaatattcttaacctgtttcagctgggtaagtaaacgttttctttatagcccccaataacgagtttgaggcttagattagttgcatgatgtaaacaatatgaaattaaaatttttttgataatatctacagcatttataaggttacaaaataaaaggaccattaatcaattctttttttcctaggctctatgactaatagctttcatatttgaggcctacaagagcaaatggcaatgttctgtgttatgagacactttcttagaaggccaaaaataaaactggataccaaaagatacacattactattatgttgagatcatccttactgatatatgtataattagaaatagatttgccttccttcaatctttagccaggagactgagagatctttactatgattttgagagtaaaaacaaaaacaaaccagactctaacagctatgggaactgtaagccaaaaataatacaaaatgagtcaatacaacacatctcctcttaaaatcctcttctttgtagttaacccagttgtccccaaatgttattccaattttgtaaccatgtagtggtttttaagaaattagaactagaacaaaacaacctgtttgtcctttcttttttacagttttttttttttacacacatattatatacaacttttaaaatagctgcacaattttatatctcacttttagagaagtgcagtccaggcagaccatgcttctcaatatattaaaaatattaaataaaacccaaccagtttcatacttttctaatagtcaagctggctggaaaaaaaaggactggagaaagaacaggcagttgtaaaatgggatcagtcttcacaaacacactacttaaaaatcttgctatttccttatccctttgacagcatctctacaatctcacctttaaagctggaaataacacattgctaacttagagacaacatcgggtgcaacatgcatatgtcaactgcccactcaaccaactgcaaccctgaggatttttctggcccagtagaaagaggaaacacgaagataatctctgctgtagagctg

SEQ ID NO: 868 - DNA, 2644 bp, Homo sapiens
  misc_feature (1)...(2644): n = A,T,C or G
acgcgtccgggctgcttgaagtcccgggagtcggtgaggcggctgcaggtccctccctgcggagccgctggtccggctggcggagatgtgaccgcgggcccggccggcctgcctcaggcgtcgcgtcagctcccgtgtccgtgcccttaacccacaccgatggcgggatccggctgcgcctggggcgcggagccgccgcgttttctggaggccttcgggcggctgtggcaggtacagagccgtctgggtagcggctcctccgcctcggtgtatcgggttcgctgctgcggcaaccctggctcgccccccggcgccctcaagcagttcttgccgccaggaaccaccggggctgcggcctctgccgccgagtatggtttccgcaaagagagggcggcgctggaacagttgcagggtcacagaaacatcgtgactttgtatggagtgtttacaatccacttttctccaaatgtgccatcacgctgtctgttgcttgaactcctggatgtcagtgtttcggaattgctcttatattccagtcaccagggttgttccatgtggatgatacagcattgtgcccgagatgttttggaggcccttgcttttcttcatcatgagggctatgtccatgcggacctcaaaccacgtaacatattgtggagtgcagagaatgaatgttttaaactcattgactttggacttagcttcaaagaaggcaatcaggatgtaaagtatattcagacagacgggtatcgggctccagaagcagaattgcaaaattgcttggcccaggctggcctgcagagtgatacagaaatgtacctcagctgttgatctgtggagcctaggaatcattttactggaaatgttctcaggaatgaaactgaaacatacagtcagatctcaggaatggaaggcaaacagttctgctattattgatcacatatttgccagtaaagcagtggtgaatgccgcaattccagcctatcacctaagagaccttatcaaaagcatgcttcatgatgatccaagcagaagaattcctgctgaaatggcattgtgcagcccattctttagcattccttttgcccctcatattgaagatctggtcatgcttcccactccagtgctaagactgctgaatgtgctggatgatgattatcttgagaatgaagaggaatatgaagatgttgtagaagatgtaaaagaggagtgtcaaaaatatggaccagtggtatctctacttgttccaaaggaaaatcctggcagaggacaagtctttgttgagtatgcaaatgctggtgattccaaagctgcgcagaaattactgactggaaggatgtttgatgggaagtttgttgtggctacattctacccgctgagtgcctacaagaggggatatctgtatcaaaccttgctttaatcagtaacctaaggactgtttcctttttctcctcttccatttcttgggttattccacatatgaatgcaggactacccccttaccattttaagaaggtactttatacatttatttaatcctactaatgtgcagccattgcccaagcagtgactgcgttgcatacatttggcactgagtaggacaagacctctcagctatacattgaggggttttagagcatccatgtgggcaacccttttttgtgcgggagagcaggtgttgctcttcagtatgtagcctaaaaaaatcttaattatttcatggatcatgaagcaaggatgaataatatcatgtcttggtaaatactaacaaatttgttaggtttggtgacatcatttacagattatttctttatgttgtccagtggttcttccttattgttgatatccataagctggcactggatgctctcagtaatgttaagtaattgtcaagcagcagttacctactgtgttcttaacactgagttgtgaattttttcttaaaagcagtactgtagtactgaatattcctttaaaggaactgcagtgagcctatctaagtttttttaaattaaggcttttaaaatagaaagctgatgcttgatcttgcacaattttaatgtctagtatgtatgcttagagtgaatgtgcgagtatgaatgattagagaaaatctcagccaatgtactttatagtgtgaatcctgtgagctaatacagtctatacttatttcttccctacctgtttcacatccgtaagatttaggatatacattttttgagaggtagtctgtctgatacaatgtaaatgacaaaacataattcctgagaggcccagaacaaactggagtctagcctggagttaaattgagacttctaaaatgattggaacaaagactaagttgtgccagatgtaaatcaacccctcttttagtttactttagactttgtattagctcatcttttttgtagtaaatctatagttttaaggtttctcaagatgtggctctacctactatgatgaaaattgaagtgggtcaaaagaattagatgtacctgcccgggcggccgctcgaannnnnnnnnnnnnnnnnnnnnnnnnnnnnnnnnnnnnnnnnnnnnnnnnnnnnnnnnnnnnnnnnnnnnnnnnnnnngtcgaattacaattcactggncgctgtttacaacgtccgtgactgggaaaa

SEQ ID NO: 869 - DNA, 494 bp, Homo sapiens
gcggccgcagggccatgctagccttgcgcgtggcgcgcggctcgtggggggccctgcgcggcgccgcttgggctccgggaacgcggccgagtaagcgacgcgcctgctgggccctgctgccgcccgtgccctgctgcttgggctgcctggccgaacgctggaggctgcgtccggccgctcttggcttgcggctgcccgggatcggccagcggaaccactgttcgggcgcggggaaggcggctcccaggccagcggccggagcgggcgccgctgccgaagccccgggcggccagtggggcccggcgagcacccccagcctgtatgaaaacccatggacaatcccgaatatgttgtcaatgacgagaattggcttggccccagttctgggctatttgattattgaagaagattttaatattgcactaggagtttttgctttagctggactaacagatttgttccacttacttacatgatcatttcgagagatgtaa

SEQ ID NO: 870 - DNA, 538 bp, Homo sapiens
  misc_feature (1)...(538): n = A,T,C or G
gccttgcgcgtggcgcgcggctcgtggggggccctgcgcggcgccgcttggactccgggaacgcggccgagtaagcgacgcgcctgctgggccctgctgccgcccgtgccctgctgcttgggctgcctggccgaacgctggaggctgcgtccggccgctcttggcttgcggctgcccgggatcggccagcggaaccactgttcgggcgcggggaaggcggctcccangccagcggccggagcgggcgccgctgccgaagccccgggcggccagtggggcccggcgagcacccccagcctgaagttactggcaggtcattcggtcgggatgaatttcagggtcaccagcggggtccacctacggtctctgtggtcaagttagaaatcctctcatcccccttctatctgcacccgttgctggaagggccgcctctgcatattgcattgataaagtatgaaaacccatggacaatcccgaatatgttgtcaatgacgagaattggcttggccccagttctgggctatttgattattgaaga

SEQ ID NO: 871 - DNA, 828 bp, Homo sapiens
atgacattaaaagctctcccacactcatgctcgggtgtcttctgtctggctagcatatcaacagggaagagtctaaaagttaggaaacggaagcgtccgagctgcaccacccagagcttgttacctgagtgcaggggcggcgaccccagcccagggccggcccgccgccgcctcatcgcggcgcccgctccggccgctggcctgggagccgccttccccgcgcccgaacagtggttccgctggccgatcccgggcagccgcaagccaagagcggccggacgcagcctccagcgttcggccaggcagcccaagcagcagggcacgggcggcagcagggcccagcaggcgcgtcgcttactcggccgcgttcccggagcccaagcggcgccgcgcagggccccccacgagccgcgcgccacgcgcaaggctagcatggccctgcggccgcgccgcggggtctcgggcggcgagagctcagcagcctgggacactggcgagccgcttctccatggagacccggcaaccactcagacactgggctaccgctgcctccatactactttacacaccccagcacgctccacttatacaggtggcaggaagccgccaagggcggacgccttcgcgacgcttttacgacaccgtcgtcgtcgggcttcccggcgcccctggcacagcggaggcgcgcgcatcaggctcagtgggttttgggaagcagcgggtacgcggcgctctcttctcctggcccgcagccgggagccaaggcccgggggtgggcggggaaaggggagaaacgaacaagataggatgaccgcgcagccgacgtag

SEQ ID NO: 872 - DNA, 1911 bp, Homo sapiens
  misc_feature (1)...(1911): n = A,T,C or G
cccccccctccacgaacagggggctagcaagaacaacaagctggagcagcatcacacccagagactacgcgtgcggccgcagggccatgctagccttgcgcgtggcgcgcggctcgtggggggccctgcgcggcgccgcttgggctccgggaacgcggccgagtaagcgacgcgcctgctgggccctgctgccgcccgtgccctgctgcttgggctgcctggccgaacgctggaggctgcgtccggccgctcttggcttgcggctgcccgggatcggccagcggaaccactgttcgggcgcggggaaggcggctcccaggccagcggccggagcgggcgccgctgccgaagccccgggcggccagtggggcccggcgagcacccccagcctgtatgaaaacccatggacaatcccgaatatgttgtcaatgacgagaattggcttggccccagttctgggctatttgattattgaagaagattttaatattgcactaggagtttttgctttagctggactaacagatttgttggatggatttattgctcgaaactgggccaatcaaagatcagctttgggaagtgctcttgatccacttgctgataaaatacttatcagtatcttatatgttagcttgacctatgcagatcttattccagttccacttacttacatgatcatttcgagagatgtaatgttgattgctgctgttttttatgtcagataccgaactcttccaacaccaccgaacacttgccaagtatttcaatccttgctatgccactgctaggttaaaaccaacattcatcagcaaggtgaatacagcagtccagttaatcttggtggcagcttctttggcagctccagttttcaactatgctgacagcatttatcttcagatactatggtgttttacagctttcaccacagctgcatcagcttatagttactatcattatggccggaagactgttcaggtgataaaagactgatgaaagtcatccctcactgttagtaaggaagcagtatacatcaatgggaacagggcccatggaaatgtacaggagtttccctattttggtgttcagcttgaaaaaggacttgtcagaatcaactgtgtcatcaaaatttaagtaatgtgcattgaaaataaggttgatcatgggaatatgcagaatttccaatgtatttttaaatacaaataaaattgtaatttagaatttttaaaaaaaaaattcatgattaatttataagagatcaattattgtcagtcttttttgtatgttttttaaaaacatagtccagagcatgggcagaattgacacctctcttttaagtgaaatttggattgctcacaaagcactaggaaatgtcatggggttcaaatatatatcctacacaactgggcaatacatttttgtttgatttttaggtctgtgtatacattaacagttcatgtaattaatacctgatcatttgggataatgaaagtgaagttagttgtagatgaagtaaagttataaaagagattaaaaatgcggtaactttttaagataataatcatacagaaggtatgaagttcattttcggtagtcttccaacctctcaggtgcctaataatttatgtttgaggataacaggtaacaaagatagtcgagataggagaacgtgtctattagtctttgcatctaaaaggcagtgagttacgttcctgccttccactgtgtttctgacatagcaatgtttgtttgatattggaacctggattcatattttatgtaaataatatcaagctgtatatttttcaaaggttttttaaactttggagactctttcttttgttaagcagttaaaggaataaaagagctggaaaaaaaaaaaaaaaaaaataaaaaaaaagaccgcaagcn

SEQ ID NO: 873 - DNA, 2810 bp, Homo sapiens
  misc_feature (1)...(2810): n = A,T,C or G
cgcccgggcggcggctgcagctccggtcgagccgcgcgcgctgcgaccccgctccgcagcccgctagtcgcccccgacccagcccagggccccggcgtggcccccgacccggcccccgcacccgccccgccgccgaccctatggagctgctggccgctgccttcagcgccgcctgcgccgtggaccacgacagttccacctcggaaagcgacgcgcgcgactcggcggcgggacacctgcccggcagtgagtcgtcctccaccccgggaaatggggccacgcccgaggagtggccggccctggccgacagccccaccacgctcaccgaggccctgcggatgatccaccccattcccgccgactcctggagaaacctcattgaacaaatagggctcctgtatcaggaataccgagataaatcgactctccaagaaatcgaaaccaggaggcaacaggatgcagaaatagaagacaataccaatgggtccccggccagtgaggacaccccggaggaggaagaagaagaggaggaggaggaggagccggccagcccaccagagaggaagactctgccccagatctgcctgctcagtaacccccactcaaggttcaacctctggcaggatcttcccgagatcccggaggagccgggaccttgagatcctacagcccctggagattaagcgagagcaggccatgttcgagctggtcacttccgaggcgtcctactacaagagtctgaacctgctcgtgtcccacttcatggagaacgagcggataaggaagatcctgcacccgtccgaggcgcacatcctcttctccaacgtcctggacgtgctggctgtcagtgagcggttcctcctggagctggagcaccggatggaggagaacatcgtcatctctgacgtgtgtgacatcgtgtaccgttatgcggccgaccacttctctgtctacatcacctacgtcagcaatcagacctaccaggagcggacctataagcagctgctccaggagaaggcagctttccgggagctgatcgcgcagctagagctcgaccccaagtgcagggggctgcccttctcgccccgcgtccgcctgcctttccagaggatcacacgcctcaagctgttggtccagaacatcctgaagagggtagaagagaggtctgagcgggagtgcactgctttggatgctcacaaggagctggaaatggtggtgaaggcatgcaacgagggcgtcaggaaaatgagccgcacggaacagatgatcagcattcagaagaagatggagttcaagatcaagtcggtgcccatcatctcccactcccgctggctgctgaagcagggtgagctgcagcagatgtcaggccccaagacctcccggaccctgaggaccaagaagctcttccacgaaatttacctcttcctgttcaacgacctgctggtgatctgccggcagattccaggagacaagtaccaggtatttgactcagctccgcggggactgctgcgtgtggaggagctggaggaccagggccagacgctggccaacgtgttcatcctgcggctgctggagaacgcagatgaccgggaggccacctacatgctaaaggcgtcctctcagagtgagatgaagcgttggatgacctcactggcccccaacaggaggaccaagtttgtttcgttcacatcccggctgctggactgcccccaggtccagtgcgtgcacccatacgtggctcagcagccagacgagctgacgctggagctcgccgacatcctcaacatcctggacaagactgacgacgggtggatctttggcgagcgtctgcacgaccaggagagaggctggttccccagctccatgactgaggagatcttgaatcccaagatccggtcccagaacctcaaggaatgtttccgtgtaccacaagatggatgaccctcagcgcagcccgaacaaggaccgcaggaagctgggcagccggaatcggcaatgacccccacccagggggccagcgggagcagggcctgcatgagaccccgacagaaggtgggggggggggggctctgggaagcacaggccagcacctncccaggtggcaggatctggcttggggtgcccggccctcatccctgcccacgcagtgagtgctcatgtgtcttggccccttgctcgcaaactggataaagggtgcccaagcctctcctgatgcatttgtaaacaagaaggtttcagcagtattacaccacctccctcatgcctccgagggggtggaagggggtgggcacactccagggccccccatgcccctggcccccagggactggaagaggctcccaacccagagtgtccctgtgggaggcaggcagaaggtgacaattgacacgatttcctgcacgcgtcctcctctaccttggaagcagttagaatctaccaggcacagatgaggccgcccttgcctgacggagcttgatgagcagcccttggtctccggttccaggactgagagcccagctgcctctgcccacccttccccaggcctctgccagcctctggctgcacggtcaggccctgccccatggcaggcctgccagagcttggctggggacccctcccgcctctggctccctgatgggctggatgtaacttgtgtcttctagccccttaaggagcccaggtgttttaaggaatgaattggtcactgcatcttgtatcgattatggttctgagaaaagcaaatatcacttttggctgcattaaaagaagcatcatatataaaataaagaaaaaaaaagtctaaaaaaaaa

SEQ ID NO: 874 - DNA, 147 bp, Homo sapiens
  misc_feature (1)...(147): n = A,T,C or G
acgcgtccggatccttatgtctatgttgaaatccatggaatccctgctgattgngcagaacaaaggacaaaaacagtgcaccagantggagacgctnccatngttgatgaaagctttgaatttnaaatcaacctgcctgaactggcc

SEQ ID NO: 875 - DNA, 157 bp, Homo sapiens
ccacaaggttcatgtgggcgccgtgtaggatggtgccggcaaagtgtccctcagtaaaggctctctctgccgagaggccatggtcctccgctttgttccgatgaaagttctgaatttgcaagcagacttcccgatggaaattctacacgtgcgaaat

SEQ ID NO: 876 - DNA, 305 bp, Homo sapiens
  misc_feature (1)...(305): n = A,T,C or G
ctcaagactccgctggccatggagtggcctgaaagagagcaagaacatgtggatctttgataggattgttaccaaatggtgtcagtatggaccaattgtgtgaccatgagaaggatgcttattttttttaaaaagaaaacacatctaaaagcccaggaactgatttttttaagaggaaaactaatgacagtgtataactgatgtttaaattgtgcatntngtactatttaaatgttttctcntactantatnttatntcctcttgttgtcgtnnnnnnactggagctccagtgtctcttcccncc

SEQ ID NO: 877 - DNA, 3285 bp, Homo sapiens
  misc_feature (1)...(3285): n = A,T,C or G
caaagacacctacttagacaatgcgatgcaatttcctcattttattaggaaaggacagtgggagtggcaccttccagggtcntngaaggcacgggggaggggcaaacaacagatggctggcaactagaaggcacagtcgaggctgatcagcgggtttaaacggccctctagactcgagcggccgcccttttttttttttttttagtaaagtgagtaaaaacctgaaagtctgttaggagattcacttggggacagtgacggttggatgtacatcactccccatgcttccaagaacgcttcccacagcttgtccagcacagatttgggaacatgctgggcaggcacagaccaggccaggctgctgacagagcactggtgttccctcagcagccccccgtggcaacggggtctcctaaggcccagtgttgacagtgctgtctgcgtgacgtcctcacttctccccggaagcggcaggactcttgaagacctcagcgtcctctggcttcaagaagaccctgaaaactgtcgcagataaactttcctcgggctgagcagactgcctatctcgagcacttgcctctcttaaaagggggaccagggcaaagttcttccagtgtctgcctgaaactctgcttgaccgcagggagaagctcagggtgcgcttgacgccctcacagttgcccgggtcttcgttgatgatgcccacgttggtgttccaggtggtccagttcacctcgtccacccttgaagcaccaccggtagtcgtccttgccatcaggtgtgtaccccacctgcagcagcttgcctgagcggaaggccttcctcatgcacttaaggaagctcttctccgtgtccaggatggtgatggctctctgcagcttccagatgttcttgctctcctgtgcgatcttgttgacagtctcacccatgagggcgatgagcatgttgagcaggaggatgtaggtgagaattacaaaggccagccagcaggatgatgaagacagccttgaagtcatagttctcagtgaactccaggtcgcccatgccgatggtgaacttgaacagctccaggcaggtggagtacaggctgttgtaggagctatcggggggcctgcaggcaggcccccgccacctgtgcgacgtggactcagacggcagggagtcattcttcccgtcttcaatcagcgtcaccaccgctgtggaaaacccgaacaagaagacgatgtagacaaacatgaaacggcacaggtctctcaggatcatcttctctatcatgacggcatagatgcccatctgctggaaaccgcgggtgtagtagagcatgttggtccagcccaaggccagggagaataccatggaagccacatactccttgaggtggctgaagtacagcaccacggtggccagcatgaacagtgactgcagaaagaaaagcatctcactgtacctatccaccgcaatggcgcacaggatcctcagcctctgcaggaaatactgaaaaactcggaaaaagaagtagactcctcctaacacagacaggatctctccagtaactcggaaatagtctccaattttttccatcttaaagggaggcaagccatccacgggcctgtagtaggcagccatggtgaagatgatcatgtacaggcagtagaccaggaagttgaagtagaagatgcgcttgacgaatctgtcccacttgtcctgcaggagtcggttcagcggctccaccaagagcatgtcgtggcgattaggggtctcgctgctgctgtaggcgatcacctccagcaccgagttcttctcgcaggtgtcgatgcaggacaggtcgtacagcgaggagtgcacgggcccgtaggcccactcggtgaacttcctggacaggtgcctgcactcgggctcctggatctcccgctggagaatataggccaagaccccgatcttcccggtccttgctgccagagccagcggcgtcattcccttcttgttggtgagctcctccagcttcagcgtcgggtgcagtttggcccccaggatcagaatctcattgtacatgctcgtcacaaacttcgtgttgtcggccgtgttgtcggccacctccaccagggcgtgcagcaccgtgttgcccaccgagtccctggcgctgatgtcggccgtctgccaggagttctgcagcaggaacttcacgatgcccagctggttggtgcacgcggccagggacaggggcagttcaccgaagtagaatccaggccgccctttggttttcttaaagaagtccccatgggccgcagcctggacgtctgctccgttctccaccaggagggtcaccagggccatgttgcgtctctcgatggcgatgtgcagtgctgtctggcccttgtagtagctgtccgtgtagctggcgttgacaagctccttcaggctgtccgtttgccgcgcgatctccaggagcagggggatggtggtgttctgtccgtcgtgcaggttgagcatggctttcagcagacaggtcttccctgtctcagggtctttgaactcgttgtctgtgaggtgcttcttgctcttctgcaggaagagcagcaggctctccagatcctggcagttattctgagcaacggcttcaaagatactcctgcgatcatagagccctgagggtcttctcggtgctggcggcgacagagtcctgggacagcagcctggcaccggtggggccgtctcctggcctctggatggtgataacagggctgactgtgatggtcgggcaggagtccaagctcaccttcctcgtgagggcaatccaccgggaaagcctcctccgagtcacccttcccaaagagccgggtgcggctcttggccgtggagagctggggcttggctggaggtggcctggagttagggtctccatccagggggtctgggcaggtgtccttttggagtgggtccgcagctgcccccaagtctgtgctgctccatttcttcatccttgctggatcctctgtggcccagtgtgcaacctgaacagaagcactgtgataccaggacgggcgatctgacgactaagtgactgaccggcggggagcatctacggcctggacgtgggggacacagggacggtttgcatcccagatggcacggcagagactctccatcacactgctcagaacaatgcacaagggaaaacttgggaactgtttgaaaaaatttncatttaatattggcaagacccgtggtttgacccgcaaataactgaacccattgnaaagtgacacccgtggataaaggggggac

SEQ ID NO: 878 - DNA, 460 bp, Homo sapiens
  misc_feature (1)...(460): n = A,T,C or G
gggctgctctgcttcctcgccctggggctgctcggctcggccgggcccagcggcgcggcgccgcctctctgcgcggcgccctgcagctgcgacggcgaccgtcgggtggactgctccgggaaggggctgacggccgtgcccgaggggctcagcgccttcacccaagcgctggatatcagtatgaacaacattactcagttgccagaagatgcatttaagaactttccttttctagaagagctgcgtttagatgccaaccatattacctcagtccccgaggacagttttgaaggacttgttcagttacggcatctgtggctggatgacaacagcttgacggaggtgcctgtgcaccccctcagcaatctgcccaccctacaggcgctgaccctggctctcaacaagatctcaagcatccctgactntgcatttaccaacctttcaagcctggtagttctgc

SEQ ID NO: 879 - DNA, 772 bp, Homo sapiens
gcggccgcagcaatgccgggcccgctagggctgctctgcttcctcgccctggggctgctcggctcggccgggcccagcggcgcggcgccgcctctctgcgcggcgccctgcagctgcgacggcgaccgtcgggtggactgctccgggaaggggctgacggccgtgcccgaggggctcagcgccttcacccaagcgctggatatcagtatgaacaacattactcagttgccagaagatgcatttaagaactttccttttctagaagagctacaattggcgggcaacgacctttcttttatccacccaaaggccttgtctgggttgaaagaactcaaagttctaacgctccagaataatcagttgaaaacagtacccagtgaagccattcgagggctgagtgctttgcagtctttgcgtttagatgccaaccatattacctcagtccccgaggacagttttgaaggacttgttcaagttacggcatctgtggctggatgacaacagcttgacggaggtgcctgtgcaccccctcagcaatctgcccaccctacaggcgctgaccctggctctcaacaagatctcaaagtatccctgactttgcatttaccaacctttcaagcctggtagttctgccatcttcataacaataaaattagaagcctgagtcaacactgttttgatggactagataacctggagaccttgtaagtatattcatattttgggcaactgcattgtgatattgaaagtataattttatacttcactgcag

SEQ ID NO: 880 - DNA, 489 bp, Homo sapiens
  misc_feature (1)...(489): n = A,T,C or G
ncgcgtccggccatcgtggccgacattctgctgtacgtggtgatccctacccgacgctccaccgccgaggccttccagatcgtgctgtcccacctgctgggtgatgctgggagcccctacctcattggcctggcctgctgcacgaagcagggtccacagacgaccggattgtggtgccccagcggggccgctccacccgcgtgcccgtggccagtgtgctcatctgagaggctgccgctcacctacctgcacatctgccacagctggccctgggcccaccccacgaagggcctgggcctaaccccttggcctggcccagcttccagagggaccctgggccgtgtgccagctcccagacactacatgggtagctcaggggaggaggtggggggtccaggaggggggatccctttccacaggggcaagccccaagggcttcggtgctatttgtaacggaataaaatttgtaagccagaaaaaaaaaaaaaa

SEQ ID NO: 881 - DNA, 535 bp, Homo sapiens
  misc_feature (1)...(535): n = A,T,C or G
ngcgtctcccacgcgtccgcccacgcctccgtcaacatcggggacagtagctctgggctcatccagaccgtgttcatctccagttacatggtgttggcacctgtgtttggctacctgggtgacaggtacaatcggaagtatctcatgtgcgggggcattgccttctggtccctggtgacactggggtcatccttcatccccggagagatgaggaaactgaggctcanagaggttaagttattttccccaaatcgcagctagtaagtggtggaagccaggatgcaagctcagcatttctggctgctcctcctgaccccggggcctgttgggggtccggggaaagccaatttattccaccatccgcgcccactctcattgccgacctctttgttggccgaccagcggaccggatgctcaacatcttctactttgccattccggtgggcagtggtctnggctacattgcagctccaaagtgaaagatatggctgganactggcactgggctctgaaggttgacaccgggtctaagatt

SEQ ID NO: 882 - DNA, 518 bp, Homo sapiens
tttctggctacaaattttattccgttacaaatagcaccgagcccttgggctgcccctgaggagagggatccccctcctggacccccacctcctcccctgagctacccatgtagtgtctgggagctggcacacggcccagggtccctctggaagctgggccaggccaaggggttaatcccaggcccttcgtggggtgggcccagggcaagctgtggcagatgtgcaggtaggtgagcggcagcctctcagatgagcacactggccacgggcacgcgggtggagcggccccgctggcgaaccacaatccggtcgtctgtggaccctgcttcgtgcagcaggccctgcacgtgcagctgtgcccgccggcggtcggcctcaatgaagatggctgaggaagggcgcggtgtcggacccggccatggtcccggggggccgcgcccgcccgcgctccggtcccaccgacgatcccacctgcgaggggaggaggctggagaaaggaggatggaccgaacacaggc

SEQ ID NO: 883 - DNA, 2264 bp, Homo sapiens
  misc_feature (1)...(2264): n = A,T,C or G
ccacgcgtccngaggcgtccaccacgcgtccggcaacatggcggctgccgtggtgcagcgcccgggctgagcgacagcaagtgcagcgggctcctaccccgggtgaggggtggcctccgcgtgggatcgtgccctcttcagcccgctcctgtccccgacatcacgtgtattccgcacgtcccctccgcgctgtgtgtctactgagacggggaggcgtgacagggcccgggtcccttctcagtggtgctctgtgcttcagggcaagctccccgtctccgggcgcacttccctcgcctgtgttcggtccatcctcctttctccagcctcctcccctcgcaggtgggatcgtcggtgggaccggagcgcgggcgggcgcggccccccgggaccatggccgggtccgacaccgcgcccttcctcagccaggcggatgacccggacgacgggccagtgcctggcaccccggggttgccagggtccacggggaacccgaagtccgaggagcccgaggtcccggaccaggaggggctgcagcgcatcaccggcctgtctcccggccgttcggctctcatagtggcggtgctgtgctacatcaatctcctgaactacatggaccgcttcaccgtggctggcgtccttcccgacatcgagcagttcttcaacatcggggacagtagctctgggctcatccagaccgtgttcatctccagttacatggtgttggcacctgtgtttggctacctgggtgacaggtacaatcggaagtatctcatgtgcgggggcattgccttctggtccctggtgacactggggtcatccttcatccccggagagcatttctggctgctcctcctgacccggggcctggtgggggtcggggaggccagttattccaccatcgcgcccactctcattgccgacctctttgtggccgaccagcggagccggatgctcagcatcttctactttgccattccggtgggcagtggtctgggctacattgcaggctccaaagtgaaggatatggctggagactggcactgggctctgagggtgacaccgggtctaggagtggtggccgttctgctgctgttcctggtagtgcgggagccgccaaggggagccgtggagcgccactcagatttgccacccctgaaccccacctcgtggtgggcagatctgagggctctggcaagaaatcctagtttcgtcctgtcttccctgggcttcactgctgtggcctttgtcacgggctccctggctctgtgggctccggcattcctgctgcgttcccgcgtggtccttggggagaccccaccctgccttcccggagactcctgctcttcctctgacagtctcatctttggactcatcacctgcctgaccggagtcctgggtgtgggcctgggtgtggagatcagccgccggctccgccactccaacccccgggctgatcccctggtctgtgccactggcctcctgggctctgcacccttcctcttcctgtcccttgcctgcgcccgtggtagcatcgtggccacttatattttcatcttcattggagagaccctcctgtccatgaactgggccatcgtggccgacattctgctgtacgtggtgatccctacccgacgctccaccgccgaggccttccagatcgtgctgtcccacctgctgggtgatgctgggagcccctacctcattggcctgatctctgaccgcctgcgccggaactggcccccctccttcttgtccgagttccgggctctgcagttctcgctcatgctctgcgcgtttgttggggcactgggcggcgcagccttcctgggcaccgccatcttcattgaggccgaccgccggcgggcacagctgcacgtgcagggcctgctgcacgaagcagggtccacagacgaccggattgtggtgccccagcggggccgctccacccgcgtgcccgtggccagtgtgctcatctgagaggctgccgctcacctacctgcacatctgccacagctggccctgggcccaccccacgaagggcctgggcctaaccccttggcctggcccagcttccagagggaccctgggccgtgtgccagctcccagacactacatgggtagctcaggggaggaggtgggggtccaggagggggatccctctccacaggggcagccccaagggctcggtgctatttgtaacggaataaaatttgtagccagaaaaaaaaaaaaaaaaaaaaaaaaaaaaaaaaaaaaaaaaaaaa

SEQ ID NO: 884 - DNA, 75 bp, Homo sapiens
  misc_feature (1)...(75): n = A,T,C or G
gcgtgggttcatataaacataannnnnnnnnnnnnnnnnnnnnnnnnnnnnnnnnnnnnnnnnnnnnnnnnnnnn

SEQ ID NO: 885 - DNA, 4333 bp, Homo sapiens
tacaaaccacgcgtccgcggacgcgtgggcggacgcgtggggaactaactgctttgctgaatactccacatattcaggcacttttactggcccacgataaggttgctgagcaggaaatgcagctagagcccattacagatgagagagtttatgaaagtattggccagtatggaggagaaactgtaaaaatagttcgtatagaaaaggctcgtgatattccgttgggtgctacagttcgtaatgaaatggactctgtcatcattagccggatagtaaaagggggtgctgcagagaaaagtggtctgttgcatgaaggagatgaagttctagagattaatggcattgaaattcgggggaaagatgtcaatgaggtttttgacttgttgtctgatatgcatggtactttgacttttgtcctgattcccagtcaacagatcaagccgcctcctgccaaggaaacagtaatccatgtaaaagctcattttgactatgacccctcagatgacccttatgttccatgtcgagagttaggtctgtcttttcaaaaaggtgatatacttcatgtgatcagtcaagaagatccaaactggtggcaggcctacagggaaggggacgaagataatcaacctctagccgggcttgttccagggaaaagctttcagcagcaaagggaagccatgaaacaaaccatagaagaagataaggagccagaaaaatcaggaaaactgtggtgtgcaaagaagaataaaaagaagaggaaaaaggttttatataatgccaataaaaatgatgattatgacaacgaggagatcttaacctatgaggaaatgtcactttatcatcagccagcaaataggaagagacctatcatcttgattggtccacagaactgtggccagaatgaattgcgtcagaggctcatgaacaaagaaaaggaccgctttgcatctgcagttcctcatacaacccggagtaggcgagaccaagaagtagccggtagagattaccactttgtttcgcggcaagcattcgaggcagacatagcagctggaaagttcattgagcatggtgaatttgagaagaatttgtatggaactagcatagattctgtacggcaagtgatcaactctggcaaaatatgtcttttaagtcttcgtacacagtcattgaagactctccggaattcagatttgaaaccatatattatcttcattgcacccccttcacaagaaagacttcgggcattattggccaaagaaggcaagaatccaaagcctgaagagttgagagaaatcattgagaagacaagagagatggagcagaacaatggccactactttgatacggcaattgtgaattccgatcttgataaagcctatcaggaattgcttaggttaattaacaaacttgatactgaacctcagtgggtaccatccacttggctgaggtgaaagaaacatccattctgtggcatgttggacttgatctggcaaaaactgccaataggaggactgcccgacactgcagcaagattgaggataagatggaaggcagcagtataagctgtagatctgttcttagatctcttgaattagtgagacgacagttcccttaggcagtttgtgcatggcatcctttattctctatacatggctttaagcggttcttgcctcattttgggattctaaatggaagctttcaacagagcattccattttgtcctgttaaaaccttttgttttcacctaaaccctttctgcttagttgtatctctgtgaaaaacttgtatacacaagcgtccatgtctcacacaaatattgatgtgattattcttaagtgttaaatcattaacacttaaatgacttcattgggaatattgagcagagggactgtgcttctatgcactgggcaaggcagtatttgcttaggaaactaatttagtcatcagagatactttcctaaaaaggaaaaataaaaaacaaaatggtgccactttgggttgaagctactttgttaggcttgaattcatttatatgtcttttgattcttaaaaaaacaaaaaacattccattagaagcaccagtttttttgctcagactttgtggatcagactctacactcaacacactctaatctacttaaaggtatacaaaatatgctgatcttttttaaattatgatttcctgaatttttttcttaagtcgtctcaactgatttactcacttagcttcccttccctcatcagcatagtataatagaatgtatgttacatttttatgaatggcaggtgttcattataatctgtattgacttaaaaagtttcttcctcatgatgctaatagttttttgtatacatgggaggatagcacatttgacagtttttgcatttttatgtatgagcacagtatcctatgactgtgctacgtatatataggtaataaactggaattctgttgatgaatatagctgctgtactgtatattaatatttaatagatcaacaaatggtcattgaaaacacttgtttagcattagaataaaattatatatgtccttgggaaatattatgacagttgactttaagatcaaaaggaaaggaagacctgaaagtcatttgaacattttaggaaaagaatattggagagaaaaaggtattaaatatatagaaataggtttttaacctaacaaggtctgcctcttatgacgagaatgcaacagcttggtaaatcataaaagaaacatttaagctaataggattttcgtactgtctctatagctgtagctttaaaattcaacgtatataattggcatggaaacttaatttgcagtcttttcaagcctttaggatagtgtgatgtgtaacaaacaacctcaaatgtgaatgccttgattttatttttatggtgactttagctacagcatttcctatacccagagctaaacactggaataatactgacatcatttaatttaacataagcaattatgtttaaggagtaatttgtgtcatgtacatatttgattgattttttttcttctacataattttatttgaacaaatgtagacagtttatatgtcgcctttttctgttcaaatttgcatggcctattaagttggctggagagtgttttatgtggaaatattttcaagataatgttccttaggaagaaaataacattcttgggttgagggaaggaatgccatacactactgtctcttcagatctgaaatactccagtttagagccaggaaatttcacaggtcacaccgatttttagcattaaaaactaaggaatatacttagcacttacttaatcttttcagttttccagtttacgtctcaggaatgaagtgtagtctatggttgacaatggagttttgtgatcctgcttattgtaactgacaactgttttcaactccaagagctaaactattggcagttcatgttaagttagagtgagggtgtaggtagtgtcagtgagtggctcttgtgcctgctgtagacattaggcctgcactagggccatgtgctgtcaagattcaggaacatggctttaacaagcagatcttgtatcaaggcagaggtgatgccatgccatacttttaggaagtctgagatgataaatatttcaaggtcagtgaagtctatcaatcattctccccttcctcatcagcaatggtagatagaaatgtcctaaacttttctaaatcctagtgatgaggatgtgctgatattcaacatagtccttaaagtgaaaactgagttgttgctgacctccacaaaagaatatggaaaaaagccttgctgtacacctagttgtacagccactctggccaattccatttcctgtccctctgtggttctgactggagaccccagtgtgggggaggtcttaccatttaatatagaaatgatatcaataactaatgctatgtacttggaaaatccaaataaggaagttttaggttggtgcataactttgtttctcaaattttcgttgtcagaacaaatggaaggagaatattatttagactaatccagatttgctttctatgaaaatctaatgtctggattatcttccttttctcatggcctaagaaataaggatcaataaggaatgatttgaatgtaattttgtgaatgtgtggaaaatataaagcagggatttagccttaataaaggtaaccttctgacatctgttgttaatccccctttgtactcttttcctgtatctgcactgttattttgagatgtcatactgtacactgtattgtaaaaataaaaagtaaaattatatttcaaattttaaaaaaaaaaaaaaaaaaaaaaaaaa

SEQ ID NO: 886 - DNA, 776 bp, Homo sapiens
cctaagggaatagcttgcggccgcttaattaaagatcttttttttttttttttttgactgcatagggctcggcgttgattactctttctccattgcaattcccgtcttgataaatcggctctgtctgggcagcagaaaaggcgaacccactggtggttccgtctgtgtccttacctctgttttcaaaaacaacaagtgttccactactaaccagaaaccaacattccaccaaaaaattattccactcgtacaagcttggaaccagttagggagatttatacttaaatacattttacatgtaagaagtgtatttagatttgggtttcggttctcgttgttgttccataccttggtaagcaagtttaaatccttgccggttttgcgaatggtcactataaaagtggatgagggtttcatgcgttgtgctcagcagggccgcggggagatccgtgccgctaaattgtccaatcatggggctggtgtggtaaggtccattttgaatttcaaggaagtcatgattagcttcggtagaaaaattcagaaactgaatatgtgcacctatggaaaaacatgcaaacttaatgaaagttcatatcaaaatgtataaaatcaatgctcataaaaagggactgaagtgttagcagtctccccagacaatccctctctgtgagacagaaccatgccgtggaggacggcattcactgtggatgacagcaaaccctggctccatcttacctctgccactttttgccgcatggtctttttccatgacactc

SEQ ID NO: 887 - DNA, 446 bp, Homo sapiens
  misc_feature (1)...(446): n = A,T,C or G
ccncgcgtccgagatgctgtacagaatgagcgccaacctcgaagcctggctcaggtccacctggagagcatggaaccaggcagtgatccccgaccagaaccggtggtggcctctcctgccttggcagggcccagtccccggggccccacatctgtatctgcagccagagccatgggtcaccactttatggccagcctcatctctgctgagacatgtgctaagctggagccagaggacgccgaagagaatattgacgtcaccagcaatgaccccgaattccccgcatccccctgcaatctggatggcatccatgagacatcagctcgcctgctcttcatggccgtcaaatgggccaaaaacttgcctgtgttctccaacctgcctttccgggaccagggtggatcttgctggaagaggcatgggaatgagcttttcctttcttggga

SEQ ID NO: 888 - DNA, 1240 bp, Homo sapiens
  misc_feature (1)...(1240): n = A,T,C or G
gtccggtgccttgaaacagtatttgaggagtcttccagagcctctcatgacctatgagttacatggagatttcattgttccagccaaaagcggcagcccagaatctcgtgttaatgcgatccatttcttggtacacaaactgccagagaagaataaagagatgttggatattttggtgaaacacttaacaaatgtttcaaatcactccaagcagaacctgatgactgtggcaaacttaggagtggtgtttggaccaactctgatgaggccacaggaagaaactgtcgctgccctcatggacttgaagtttcagaatattgttgtggaaatcttaattgaaaaccatgaaaagatttttcggacgccgcccgatactacattccctgagcccacctgcctgtcagcatcacccccaaatgcgccaccaaggcagtcgaagagacaaggccagagaaccaagaggcccgtggccgtctacaatctttgtctggagctggaagatggtgacaatccttacccttccaaggaggacacccctaccagcagtctggactcactttcctccccgtctcccgtgactacagctgtccctgggcctcctgggaccagacaaaaaccaccttctggcagatgggagggagctttggagacttgggcatccacttatcccaggccagacccgatcgtctatggtcccagtggcttaacccacagtctccaaccacaacaagctccaactcagctgtgacacctctttcacccgggtcgtcccctttccccttttctcctcctgctactgtagcggacaagccacctgaaagcatccgcagtcggaaggctcgagccgtgtatccgtgtgaagcagaacacagctcggaattatcttttgaaataggagcaatttttgaggatgtacaaacctccagggaacctggctggctagaagggactctgaacggcaagagggggctgattccacagaactacgtcaagctgctgtagctcctggcctcagagcccctgctgaccctggcacccagggacctgcctgggggcagagagctgtcttcctcctccgaggctctgggctgcacccacaggtacctccacacttgggagttaccatcatcacagtcagccctgggggtggnggttggtnnncannnnaatgnggacgcaccanacataactgngattgntggatcaggaggggaaatgtnnaggatttcgcaaaatggac

SEQ ID NO: 889 - DNA, 3024 bp, Homo sapiens
atgcccaggtcaggggcactgcagcctcgagtggtcgctcagggggccctggcccgacccagtttcaagcggctcagggcgacgcggaaccgaggcggcggcggcggctgcggcggcaggaaatcggggctcggccccgccggcgcgcgaccccatccccatcccggtccctgcagagcgatccccgggcccagatatggacgcagcagagccgggacccttgagatgctggctggagaccctctactctcagaagacccagaacctgacaagacccctacagccactgttaccaacgaagccagctgttggagcggcccctccccagagggtcctgtacccctcacaggggaggaactggacttgcggctcattcggacaaaggggggtgtggacgcagccctggaatatgccaagacctggagccgctatgccaaggaactgcttgcctggactgaaaagagagccagctatgagctggagtttgctaagagcaccatgaagatcgctgaagctggcaaggtgtccattcaacagcagagccacatgcctctgcagtacatctacaccctgtttctggagcacgatctcagcctgggaaccctggccatggagacagtggcccagcagaaaagagactactaccagcccctcgccgccaaacggactgagattgagaagtggcggaaggagttcaaggagcagtggatgaaggagcagaagcggatgaatgaggcggtgcaggcactgcggcgcgcccagctgcagtatgtgcaacgcagcgaggacctgcgggcacgctcccaggggtcccctgaggactcggccccccaggcctcgccgggacctagcaagcagcaggagcggcggcggcgctcgcgagaggaggcccaggccaaggcgcaggaggccgaggcgctgtaccaggcctgtgtccgcgaggccaacgcgcggcagcaggacctggagatcgccaagcagcgaatcgtgtcgcacgtgcgcaagctggtgtttcagggggatgaagtgctgaggcgggtgacgctgagtctcttcgggctgcggggggcgcaggcagagcgtggcccccgcgccttcgccgccctggccgagtgctgtgcgccctttgagccgggccagcgctaccaggagtttgtacgggcgctgcggcccgaggccccgccgcccccgccgcccgccttctccttccaggagttccttccctccttgaacagctcccctctggacatcagaaagaagctctctgggcctcttcctccaaggctggatgagaattcagctgagccaggcccttgggaggatccgggcacaggctggcgctggcaagggactccaggccccactccgggcagcgatgtggacagcgtgggtggcggcagcgagtctcggtccctggactcacccacttccagcccaggcgctggcacgaggcagctggtgaaggcttcgtccacaggcactgagtcctcagatgactttgaggagcgagaccctgacctgggagacgggctggagaatgggctgggcagccccttcgggaagtggacactgtccagcgcggctcagacccaccagctgcggcgactgcggggcccagccaagtgccgcgagtgcgaagccttcatggtcagcgggacggagtgtgaggagtgctttctgacctgccacaagcgctgcctggagactctcctgatcctctgtggacacaggcggctcccagcccggacacccctttttggggttgacttcctgcagctacccagggacttcccggaggaggtaccctttgtggtcacgaagtgcacggctgagatagaacaccgtgccctggatgtgcagggcatttaccgggtcagcgggtcccgggtccgtgtggagcggctgtgccaggctttcgagaatggccgagcgttggtggagctgtcggggaactcgcctcatgacgtctcgagtgtcctcaagcgatttcttcaggagctcaccgagcccgtgatccccttccacctctacgacgccttcatctctctggctaagaccttgcatgcagaccctggggacgaccctgggacccccagccccagccctgaggttatccgctcgctgaagaccctcttggtacagctgcctgactctaactacaacaccctgcggcacctggtggcccatctgttcagggtggctgcacgatttatggaaaacaagatgtctgccaacaacctgggcattgtgtttgggccgacactgctgcggccgccggacggcccgcgggcagccagcgccatccctgtcacctgcctgctggactctgggcatcaggcccagcttgtggagttcctcatcgtgcactacgagcagatctttgggatggatgagctcccccaggccactgagcccccgccccaagactccagcccagcccctgggcccctcacaaccagctcccaaccgccacccccgcaccttgacccagactcccagcccccagtcctagcctcagaccccggcccagacccccagcaccacagtaccctggagcagcatcccacggccacacctaccgagattccaactccacagagtgaccagagagaggacgtggctgaagacaccaaagatgggggaggggaagtgtccagccaaggcccagaggactcactcctggggacacagtctcgtggccacttcagccgccagccagtgaagtatccccggggcggtgtgaggcctgtaacccaccagctgtccagtctggccctggtggcttccaagctgtgcgaggagacccccatcacatcagtgcccagagggagtttgcgggggcgggggcccagccctgcagctgcctcccctgagggcagccccctgcgccgcaccccgctgcccaagcattttgagattacccaggagacagcccggctactctcgaaattggacagcgaggctgtgcccagggccacctgctgcccggacgtccagcctgaggaagccgaggaccatctctga

SEQ ID NO: 890 - DNA, 938 bp, Homo sapiens
  misc_feature (1)...(938): n = A,T,C or G
cggccgctcgcgatctagaacccggacgcgtggncccgcgcgcccggcggcggcggcggctgcggcggcaggaaatcggggctcggccccgccggcgcgcgaccccatccccatcccggtccctgcagagcgatccccgggcccagatatggacgcagcagagccgggactccccccaggtcctgagggcaggaagaggtacagtgacatcttccggagcctggacaacctcgaaatctcactggggaacgtgacccttgagatgctggctggagaccctctactctcagaagacccagaacctgacaagacccctacagccactgttaccaacgaagccagctgttggagcggcccctccccagagggtcctgtacccctcacaggggaggaactggacttgcggctcattcggacaaaggggggtgtggacgcagccctggaatatgccaagacctggagccgctatgccaaggaactgcttgcctggactgaaaagagagccagctatgagctggagtttgctaagagcaccatgaagatcgctgaagctggcaaggtgtccattcaacaagcagagccacatgcctctgcagtacatctacaccctgtttctggagcacgatctcagcctgggaaccctggccatggagacagtggcccagcagaaaagagactactactcagcccctcgccgccaaacggactgagattgagaagtggcggaaggagttcaaggagcagtggatgaaggagcagaagcggatgaatgaggcggtgcaggcacttgcggcgcgcccagctgcagtatgtgcaacgcaagccgaggaccttgcgggcacgctcccaggggtcccctgaggactcggccccccaggcctcgccgggacctagcaagcaacaggagcggcggcggcgctcgcgagaggaggcccagg

SEQ ID NO: 891 - DNA, 1388 bp, Homo sapiens
  misc_feature (1)...(1388): n = A,T,C or G
agcggccgcagcagtgtcggcccaaacacaatgcccaggttgttggcagacatcttgttttccataaatcgtgcagccaccctgaacagatgggccaccaggtgccgcagggtgttgtagttagagtcaggcagctgtaccaagagggtcttcagcgagcggataacctcagggctggggctgggggtcccagggtcgtccccagggtctgcatgcaaggtcttagccagagagatgaaggcgtcgtagaggtggaaggggatcacgggctcggtgagctcctgaagaaatcgcttgaggacactcgagacgtcatgaggcgagttccccgacagctccaccaacgctcggccattctcgaaagcctggcacagccgctccacacggacccgggacccgctgacccggtaaatgccctgcacatccagggcacggtgttctatctcagccgtgcacttcgtgaccacaaagggtacctcctccgggaagtccctgggtagctgcaggaagtcaaccccaaaaaggggtgtccgggctgggagccgcctgtgtccacagaggatcaggagagtctccaggcagcgcttgtggcaggtcagaaagcactcctcacactccgtcccgctgaccatgaaggcttcgcactcgcggcacttggctgggccccgcagtcgccgcagctggtgggtctgagccgcgctggacagtgtccacttcccgaaggggctgcccagcccattctccagcccgtctcccaggtcagggtctcgctcctcaaagtcatctgaggactcagtgcctgtggacgaagccttcaccagctgcctcgtgccagcgcctgggctggaagtgggtgagtccagggaccgagactcgctgccgccacccacgctgtccacatcgctgcccggagtggggcctggagtcccttgccagcgccagcctgtgcccggatcctcccaagggcctggctcagctgaattctcatccagccttgaaggaagaggcccagagagcttctttctgatgtccagaggggagctgttcaaggagggaaggaactcctggaaggagaaggcgggcggcgggggcggcggggcctcgggccgcagcgcccgtacaaactcctggtagcgctggcccggctcaaagggcgcacagcactcggccagggcggcgaaggcgcgggggccacgctctgcctgcgccccccgcagcccgaagagactcagcgtcacccgcctcagcacttcatccccctgaaacaccagcttgcgcacgtgcgacacgattcgctgcttggcgatctccaggtcctgctgccgcgcgttggcctcgcggacacaggcctggtacagcgcctcggcctcccggacgcgtggtcgacn

SEQ ID NO: 892 - DNA, 375 bp, Homo sapiens
  misc_feature (1)...(375): n = A,T,C or G
ttttttttcagagttcccctatctttatttgtagaggttatccaataatttctttaattacatcgcatacttctgagtccattcccgagctattctgttgtacctgtacacacaaagagaagcttggcttaacataggtgtggagtcagtaagcaacagattccattcattatcccatcaagtaacttgaagagagtagcttataggacattcaaggaaaggcccctttctatcccaaatttctgataaggattaattcaatgataatgggaaggagctgtaaaatgtgaaagtctcctttaattgctacttatagagggttctgattaaattttaggnatttgttgggcatataccntattccntacttgattg

SEQ ID NO: 893 - DNA, 407 bp, Homo sapiens
ttttttttttttttaacagtaatttaaagtttattccagctataatgcaggttattctgactttaaggtagcatcacatggcatacttctgagtccattcccgagatattctgttgtacctgtaaataaagatgttatttttaaaagttaaaataaagaattcctaatactttaaatggaagggaaagatttccattttatcatctccagactcatcatgaagtcatctctaatgactatgattagaataaaagccaacaagggagaaatagcactggtactcaaagcaatgtgggaaatgagagcctgatgctctgaaagtagtattttaaaaacaactaagaaagcagcactgaaaattgggaggctaacaaaaatcaaaagaccctttctttctctaccaccga

SEQ ID NO: 894 - DNA, 761 bp, Homo sapiens
  misc_feature (1)...(761): n = A,T,C or G
cgttcgggcttgacacgtattcactcggccccggacgtgggaagcaagccgtctggcttcggcctcacatagtccaccccccctccacacgaagttctcgcgagagtcgtctcctcgataccaagcgcctgtgtctggcagagctggtgtgagacgagacaatcctgccccgccgccgggataatcaagagttttggccggacctttgagcatacaccgagagagtgaggagccagacgacaagcacacactatggcgctgaaacggattaataaggaacttagtgatttggcccgtgaccctccagcacaatgttctgcaggtccagttggggatgatatgtttcattggcaagccacaattatgggacctataagcaactatatgctggataattgaatattcagaattatggataccatctaagaatttcagagaattagagcgcactaaaacatcctgggaatgacagcccatatcaaggcggtgtattctttttgacaattcattttcctacagactaccccttcaaaccacctaaggttgcatttacaacaagaatttatcatccaaatattaacagtaatggcagcatttgtctcgatattctaagatcacagtggtcgcctgctttaacaatttctaaagtccttttatccatttgttcactgctatgtgatccaaacccagatgaccccctagtgccagagattgcaccggatctataaaacagacagagataagtacancagaatatctcg

SEQ ID NO: 895 - DNA, 993 bp, Homo sapiens
ttttagaagtacaactcatgtcgagacatgtatttattattatgctttgatatgcaatcccaggtattctgatctggagtaaaaagcaaactaaatgaagacaacttttagaaactgatgtttattttccatcaaccatttttccatgctgcttaagagcctatgcaagaacagcttaagaccagtcagtggttgctcctacccattcagtggcctgagcagtgggagctgcagaccagtcttccgtggcaggctgagcgctccagtcttcagtagggaattgctgaataggcacagagggcacctgtacaccttcagaccagtctgcaacctcaggctgagtagcagtgaactcaggagcgggagcagtccattcaccctgaaattcctccttggtcactgccttctcagcagcagcctgctcttctttttcaatctcttcaggatctctgtagaagtacagatcaggcatgacctcccatgggtgttcacgggaaatggtgccacgcatgcgcagaacttcccgagccagcatccaccacatcaaacccactgagtgagctcccttgttgttgcatgggatggcaatgtccacatagcgcagaggagaatctgtgttacacagcgcaatggtaggtaggttaacataagatgcctccgtgagaggctggtggtcagccctggggtcagtaaccacaagaagccgtggctcccggaaggctgcctggatctggttagtgaaggttccaggagtgaagcggccagcaattggagtggctccagtggcagcagcaaacttcagcacagccctctggccagtattcctggaggacataacactgacatcagcatcggttataacctaaacaaacgaactaacctcaggaataatttctaacactacatctccagaaataaaacatatacgcaacacattccacattaaaatgtactgtccatctgaagtcaagatggtgcgactaagtgggttcc

SEQ ID NO: 896 - DNA, 1946 bp, Homo sapiens
  misc_feature (1)...(1946): n = A,T,C or G
acgcgccgcagcccgcccgcccgcgcgtccctcggtccacctgcagcagggaggaagacagggcaatccctccggctgtccgaccaagagaggccggccgagcccgaggcttgggcttttgctttctggcggagggatctgcggcggtttaggaggcggcgctgatcctgggaggaagaggcagctacggcggcggcggcggtggcggctagggcggcggcgaataaaggggccgccgccgggtgatgcggtgaccgctgcggcaggcccaggagctgagtgggccccggccctcagcccgtcccgccggacccgctttcctcaactctccatcttctcctgccgaccgagatcgccgaggcggcctcaggctccctagccccttccccgtcccttccccgcccccgtccccgccccgggggccgccgccacccgcctcccaccatggctctgaagagaatccacaaggaattgaatgatctggcacgggaccctccagcacagtgttcagcaggtcctgttggagatgatatgttccattggcaagctacaataatggggccaaatgacagtccctatcagggtggagtatttttcttgacaattcatttcccaacagattaccccttcaaaccacctaaggttgcatttacaacaagaatttatcatccaaatattaacagtaatggcagcatttgtcttgatattctacgatcacagtggtctccagcactaactatttcaaaagtactcttgtccatctgttctctgttgtgtgatcccaatccagatgatcctttagtgcctgagattgctcggatctacaaaacagatagagaaaagtacaacagaatagctcgggaatggactcagaagtatgcgatgtaattaaagaaattattggataacctctacaaataaagataggggaactctgaaagagaaagtccttttgatttccatttgactgctttctatgagcccacgcctcatcttcccctgtgcacatgtttacctgatacagcagtgctgcgtgttgtacatacttggaacaacaaactagaaatactgtacttctgtaccaacattgcctcctagcagagaagtgtgtgtgtgacaagccagttctacaggcattacctaggtgtgagactaaaagcttttcttattgacttaaatttggataacagcaaggtgtgaggggggtggtgggtatggtgtgtgcttggatgggaaagaaaaggctccactcacctataggagattatttttaagtggaatccatttaaactcaaaacagttatgaaaagcaaggtgaagaacatgaagctgtgtctgtattcattttattccgaaggagctacgtcttaggtgaaagttatgaccaaccagattaaactctacccacatcctgcattttaaggtctaagtttaactggtcaacatttaaatggattggagctattagtacatcaagtgtgatgggctttgttcccaactcttttacatctccctaccccttcaacctttggcctttcagcccttctttctctcttccatattctttggtttgtatgtggtttctcagttaatacatagctaatagctcttatttttcttatgtttttaaccgcttaggtctatttggatgtaagggtgaaaattcatttgatggaaatacttgtgtatatttaaagacccaattgctcctctggagcttgtactttcaagaatgattaatctgtgtaataaactggttactacagtcattacatataaaaaaaaaaaaaaaaaaaaaaaaaaaaaaaaaaaaaaaaaaaaaaannnnnnnnnnnnnnntttttttttnaaaaaaaaaanccccccccccccccccccnnnnaaaaaaaaaaaaaaaaancccnggggggggaaaaattttntttngncccctnaaggggggnaaa

SEQ ID NO: 897 - DNA, 4713 bp, Homo sapiens
tttgacagtggacttgcaaactttaattaggtatggatgccaattatggttgctgtttctaggtgtggtatcttctttcggaagaaattaatacccatgttgacacgatactgatctgatattgatctggaaatgtccccccacccccattctaaggagaatcagaaacagactacgtttaaataggagggataacagtaagtccttactgtcttgtctcaggctacatcaactctcctgttctctatatggtatgaagggaccttgacggtcttttgttattccatagaacatcacactgatttatcagagtaatgaaattatattaaatgaaactgaagagcagaagtaggcagcattctacatgctttggtacgacatatgcatgctagaaggtgcaagatgaaccttgaaaaacttccaggactcttgccacaggtttctaggggtccaatggccagaaatatgttaggatatccataacatccatacttttttctcttccattaactggtcagagggaactcattatgatgacagtttatgtgggttgagggagaagtgctgaaggagtagaggcaggtactataggagtctgagtcacctgctcattcatggttccagtcccatatgtagtgcactgctcctgtgttcatccagttgtacagtttgatgagtcaaataacaacaattcatgatgggcagtttgattcacacagtcacttgatgtcccatggtcaggtgttacatctcttccaggtaccagtagcaagtcaagaggtacttcctcccaagatccccttccgcttcccgatgcttctctgagcctaagggtttccgccactcgttcaccctccccccagctcatgatcctcctccctcccccgccctcctggtccaatctccgatctgtttagtaagaaggtgctgttccgagaaggagaaggaaaagggcttgacacgtattcactcggccccggacgtgggaacgcaagcccctctggcctcggcgggaaaccgctgctgcgctgggggcggcccgagggcccggcttgaggggggccccggccactctgcgcctgtgtctggcagagctggtgtgagacgagacaatcctgccccgccgccgggataatcaagagttttggccggacctttgagcatacaccgagagagtgaggagccagacgacaagcacacactatggcgctgaaacggattaataaggaacttagtgatttggcccgtgaccctccagcacaatgttctgcaggtccagttggggatgatatgtttcattggcaagccacaattatgggacctaatgacagcccatatcaaggcggtgtattctttttgacaattcattttcctacagactaccccttcaaaccacctaaggttgcatttacaacaagaatttatcatccaaatattaacagtaatggcagcatttgtctcgatattctaagatcacagtggtcgcctgctttaacaatttctaaagttcttttatccatttgttcactgctatgtgatccaaacccagatgaccccctagtgccagagattgcacggatctataaaacagacagagataagtacaacagaatatctcgggaatggactcagaagtatgccatgtgatgctaccttaaagtcagaataacctgcattatagctggaataaactttaaattactgttccttttttgattttcttatccggctgctcccctatcagacctcatcttttttaattttattttttgtttacctccctccattcattcacatgctcatctgagaagacttaagttcttccagctttggacaataactgcttttagaaactgtaaagtagttacaagagaacagttgcccaagactcagaatttttaaaaaaaaaaatggagcatgtgtattatgtggccaatgtcttcactctaacttggttatgagactaaaaccattcctcactgctctaacatgctgaagaaatcatctgagggggagggagatggatgctcagttgtcacatcaaaggatacagcattattctagcagcatccattcttgtttaagccttccactgttagagatttgaggttacatgatatgctttatgctcataactgatgtggctggagaattggtattgaatttatagcatcagcagaacagaaaatgtgatgtattttatgcatgtcaataaaggaatgacctgttcttgttctacagagaatggaaattggaagtcaaacaccctttgtattccaaaatagggtctcaaacattttgtaattttcatttaaattgttaggaggcttggagctattagttaatctatcttccaatacactgtttaatatagcactgaataaatgatgcaagttgtcaatggatgagtgatcaactaatagctctgctagtaattgatttatttttcttcaataaagttgcataaaccaatgagttagctgcctggattaatcagtatgggaaacaatcttttgtaaatgcaaagctgttttttgtatatactgttgggatttgcttcattgtttgacatcaaatgatgatgtaaagttcgaaagagtgaatattttgccatgttcagttaaagtgcacagtctgttacaggttgacacattgcttgacctgatttatgcagaattaataagctatttggatagtgtagctttaatgtgctgcacatgatactggcagccctagagttcatagatggacttttgggacccagcagttttgaaatgtgtttatggagtttaagaaatttattttccaggtgcagcccctgtctaactgaaatttctcttcaccttgtacacttgacagctgaaaaaaaacaacatgggagtaataatgggtcaaaatttgcaaaataaagtactgttttggtgtgggagttgtcatgaggctgtgttgaagtgacttatctatgtgggatattgagtatccattgaaatggatttgttcagccatttacattaatgagcatttaaatgcaacagatatcatttcaggtgacttaacatgaatgaataaaagtcaatgctattggattgttaaaaaaatgacaagtgctatctgtgccactgatttaacttctgtagtaacaagggcattaccattcttcacctttcctaattctgatcccatagttttacatttttcctgtttattttgattttgttcactgctttatttcttaaagttctagcacatctgtgactcctccacttccacatttttgcactgcttacacttacgtgcaatcttattccttgtctgcacacacatgtggaaagctagaaataaatgttaaaacttactttttataaacattttaaaaagtagtttggacatgatttattgacttaaggttcttctctaaactggaagtgaaatgcatgccttctgaagatgttctggctttgttaattctgtaatcatttcattggggaaaaaaccagctacgcagtttttccaatgagtgaattttttcattttgtgttttgcttaaaacggctccttcagggtagatgtcatactgcataacttttttggattcaaattatgaatgagaaattagttaacattctgctccacaaggtaagaaaaactgctctttggctctattttcaaaattacttctgagatgcatatagtctcaaaataacagctttagtaggcatatcacttcttgaaagccaaacatgagtgtaagacacttttatgaaacacggtggatccctaactggctttcaaattgacctttatagccttagacaacccttaggtatttacggagatgacttctttgattgtcataacaattagtggatgtgtccagttctctgtatctttgacttgatgctttatacatcatttcatttgttgcttctaagggaataagccatagaggcttctccaggtttaaaagaacagtaaagtacctggaaaaccaacatttttgaatgtatggacactggacatgagatatgtacaatgaaatcttaaaagaatctaagaatttgccctctttgccccactccacccagtaatttgacattactagtgccatgtataggacccaactgagtattagaatcagttttgactatgtctttgtatttcctaaatcttttaatgcataaaccgaattagggtccagttggcctgttaatggtaaatttacattttaaatgactcagtttgtttttcctgggcgagtttgcaatgtgataatcagattttttaaaactgattaatttgctttcttgtgtgggtgtactcacattttaaagtatgaaccacagttaactagtggtctcaggggtagtgaaacactcactttttttttttgtttgtttttttttgtttgtttgttgaaatggcttagttgaagtatacttaaggtactgatcatgctgtgttagtaatttgggcggggaggggggtaactcagccatgttttgtgttggcataacaaaactgttaatgattgttgattacacttttaagtgaatttgtcttttatgaggaacccagtgcaagtcactaaatattgtctaatagtgacatctgcataagacttgtaatagctgaagttaattgagcttaaaggaattgttaccattaaagtctgtgtttaaagacaaaaaaaaaaaaaaaaaaaaaaaaaaaaaa

SEQ ID NO: 898 - DNA, 4374 bp, Homo sapiens
  misc_feature (1)...(4374): n = A,T,C or G
ttttttttggttgtggtattgatttatttttccccagcacatcttaaaaatcacacatgggcatttgcttatagaacaatacagtctaagaaaaccagtaagaggagaatctgaacacacactgaaagcacggaatactgactatgtgttgagcccttgtggaaaacagtatggctcagtcggaattgacaaagctatgctggaatctctcaggaattttccttcccactgcatatccccttttagactataaatgtaaagagaagaattgtttgtatgcattagttacagcagtataatggcttacatacaagtgcttactcacatgtagttcccaaaggattactacagtcctggcaggaatatgtactgccttggaggaagactcaggataagatattattcaagttaagttgtatcagagccaaagtatttcacaggcttagcaaaaatggacaagaattaatataacctacatatatttctcataagatttaatcattgtccagaacagaaatattcgttattctgaaggcaccatcacncgaaaaaggactgacacacaatattaggaatagaaaccacccgcactccccagctccacaggttctgctcctcagggagcctgtgagcaaacatccagaaagaatgtagtgaggttctaaaaccccgggcggccgcccttttttttttttttttttttttttttatcttcaaatttaaatttattaagacattcagctatgtctgtcagtctacatccaaatttgctactaaaaataaaataaagtcacatcccacattaggaataccgaggtctgaaaaacactttttgagccaagcctattgtataaataaatgactagtttcttttcatatcaaaattcccataaaaaattacattcccccctccccagttctacctgtagccatgatgaatgtaaaaatttaaatatgacacatccttgtcaaagaaaaggtgcaaagtctattaacagctttaaaagtggcatttgcagagtgtgatcatacagttatgtactcattcccaaagtgcaaatattgccataatttaacactgttttgattcagttgcaagaattaaacattacacaggattgaaaagtacacccagggcctctatcagtgccctaaagcccttcccactttggtctccttcactaaagcagactccaaagtgttcatcagagttttagtttacttcacacagccagcgaagtatacaacatatttaacaaaagtttcatatacatcaaaatattgaagactccgtcataaagttcaagagtctcagattacatgaatgcacccgcaaggcccaagtgcccacccaccccttccctaaagcacatacaaagtatgagcgtgcttcaatctttgaatacaatcaatgcttcttcatctttgatttcatttcagtgctgtacaagactcaataatcacctgactgagctccaattaactgaggagaaacggggtggaggagagggctggttgctattcagacttgataatgagattgatctgtcccatggagagtgaaagttcagttccacttctgcctccttctttccatgctgtcctcatgctctttatcctcacttcctcagtcccttcaacactcaaaatctgattttatttctctctcacacgtatcaggggcagtttctgaagttgctgaggttgaattttcttcacaaacctctataaaacatcagcagagaacatataaatacattttgattagcatacattgcaaaatttctcccacaatgtcaggggatgaaagcaggtggtccccactgagagtacttcctggattagatccttggaatgtcagtttcctgcctgatcatctcattttcattcctcaaatcagaacatgaattccatcttgagttaacttctcctccagagtatcaaagcatcattcctgctgcttctcctctaggctgattcaacaggatgtgcttcatctttcgcactgtgaggatattctttggggtcaaaagccccttcctggttatctggtcgtctggcaatgtactcattattgtccctggaaccttcctgtatcctggtccctggagtatgctcctggcctgggggttcagtaccttcctgaaacatgacgttttgctcagctccagcatgaggctgtagaactggctcagttcctaatcctggaagctgggaggagtttttcagatggcagtggcacagagggcaggtctcctggacatacagccatttcttaagacagcctgcatggaaaaaatgactgcaaggcgtgatcacagcagatttcatgtcctgataacagatggcacaaatatcattgtgtttctcaagctgctctttcgtagcaatgggtaacgatttaatcttattcacagcatccctgcggagaagaaagctcttccaccccagctgggcccgaagccacacgttatagtaggaatgaatgaagatgatcattgagcccatcactgtccattctccaaagatggtctctgagacgccataggccaccacacagagggccacaagaaactccagcaggcggtaagtgccattcacatagtagatgacatcatccatgttttccactggctcttttctgaattcctcaaccataaataagacataaataaaaagtgttcccagaacctgaagagaggtaagaatgctgctggaaataatgataagaagccaaaaatccatgtggaaaaactggcaaatcatataagccatataagcagggaataccaataaaaataaacaaaggcttacagcacggaagtgtttccacaagctcttgtctctagatgctcccagtgccaaaacaataggatctgcaatttctaacatagactgtaggatagaagctacgacaatgaaaaggataatactgagcaagaatgcccgatgaacaacctgcagttctatcagcccagtctgcactgccaggattaacagcgttactccttctgtcatgccccgattcatggcaggatcattcatgaaaacctcgataaccctgcaagtaaaacttgcagagtgtgagaacacccaaggcaacaaaagaaaccgtgaagaccaaacccaaaagagagtaaggagtgctgcagcattccgcaatacttgtcagaaaaaggaaaagaagcctctcacgtgatgcaggctgatctcgagtactgaaataggagtaaatctgaagagcaaataagacgagccagaaaaccatgaaaagaacagggactaccagttgattccacagggacattcccaaggcgagaaggccatatacctccactacctgaaccaattctctgtatgcagatttagcaaggttataaggtaccaaaagattagacccaagaaaatagagaacttccaatccagtaaaaatcatagcaaatttattgatgataacaattgtctccaaaggaacaaggcagagtcgtgctagcagaggaagcatgtgagctgaaaacagccaaatctgctttgttttcatgacacaggagcataaagtacacaccaccaactgacctattaaggctgtggtaaaccgattcatagagagaggttctaaatacattggtccctcataggcaaactccagttcactccgaacatagtccctggaaatttgatgtccagcatagaggagcagagcagtcaaaaaatatagataaagctgaaccagatgctgcctgggcaatgttagcagcaccacacttaagatataacctacataatgcatattaagagccaaatacttatactggaaaagagggttattactaaggctacttctttggatctgctggaaaaaggagctgacatcccatctgtacaggacatccaacagcatgatgcttggcaccctcagggccacatttaacactgcctccagtttctcctttgcagccatgttgtttttttttttctttttttttttcttggagaagacctcaggctgcggactccctccctggggagcggcgctgccggcgggcgggctccgcaactccccggctctctcgcccgccctcccgttctcctcgggcggcggcgggggccggtacggcacggctcacagcggcggctcttctgcgccgagcctcggatgttgcttctggggaggcggaggcagcggcagcggcagcggcccggcccgtacggtcaccatcgtccgcggcagcaggcgctcgcgggccgagccccttagcagccggcgccggcgtcggcggcggcggcggcggcggccatacccccctcctttccctcctccctcctaactaaccaatcaaaanaacgaataaaagctactttttggggaaggtt

SEQ ID NO: 899 - DNA, 701 bp, Homo sapiens
  misc_feature (1)...(701): n = A,T,C or G
cgcgtccgccgtgaccgactcttcagtgtggtctcccggggtgtccccgaggaactgactggactgctagaatacctgcgctggaacagcaagtacctcactgactctgcatacacagaaggctccactggaaagacgtgcctgatgaaggctgtgctgaaccttcaggatggggtcaatgcctgcatcatgccgctgctgcagattgacaaggattccggcaatcccaagcccctcgtcaatgcccagtgcaccgatgagttctaccaaggccacagtgcgctgcacatcgccatagagaagaggagcctgcagtgcgtgaagctgctggtagagaatggagcggatgttcacctccgagcctgtggccgcttcttccaaaagcaccaaggaacttgtttctattttggagagctacctctttctctggctgcgtgcaccaagcagtgggatgtggtgacctacctcctggagaacccacaccagccggccagcctggaggccaccgactccctgggcaacacaagtcctgcatgctctggtaatgattgcagataactcgcctgagaacaagtgccctggtgaatccacatgtacgacggcttntacaaatgggggcgccgccttttgccccactgtgcagctttgaggaaatntncaaccaccaaggccttacacccctgaaactagccgccaaggaa

SEQ ID NO: 900 - DNA, 677 bp, Homo sapiens
  misc_feature (1)...(677): n = A,T,C or G
tccgggagcaggacgcttggtccggacggagctcggcgctgggaagaagccgggagcttccctgatggtgccgccgcctccgagccggggaggagctgccaggggccagctgggcaggagcctgggtccgctgctgctgctcctggcgttgggacacacgtggacctacagagaggagccggaggacggcgacagagaaatctgctcagagagcaaaatcgcgacgactaaatacccgtgtctgaagtcttcaggcgagctcaccacatgctacaggaaaaagtgctgcaaaggatataaatttgttcttggacaatgcatcccagaagattacgacgtttgtgccgaggctccctgtgaacagcagtgcacggacaactttggccgagtgctgtgtacttgttatccgggataccgatatgaccgggagagacaccggaagcgggagaagccatactgtctggatattgatgagtgtgccagcagcaatgggacgctgtgtgcccacatctgcatcaataccttgggcagctaccgctgcgagtggccggaaggctacatccgggaagatgatgggaagacatgtaccaggggagacaaatatcccaatgacactggccatgaaaagtctgagaacatggngaaagccggaacttgctgtgccacatgcaaggagt

SEQ ID NO: 901 - DNA, 646 bp, Homo sapiens
  misc_feature (1)...(646): n = A,T,C or G
tactatagggagtcgacccacgcgtccgcggacgcgtggctctgagagcctcaaaccccaatgtaggcctggctgttggagatctatccctctggtcaggcccctctctgtgctgtcatgtcaccaccctgcccttgccatgccttcatcccaaggcctcccgaagccagccatcctcacgcatgagcgggtacttgcagatgagcaagatgctgtccttatctggggccacagctgatgatgtggtttacacggtcctgcctctgtaccacgtgatgggacttgtcgttgggatcctcggctgcttagatctcggagccacctgtgttctggcccccaagttctctacttcctgcttctgggatgactgtcggcagcatggcgtgacagtgatcctgtatgtgggcgagctcctgcggtacttgtgtaacattccccagcaaccagaggaccggacacatacagtccgcctggcaatgggcaatggactacgggctgatgtgtggggagaccttccagcagcgtttcggtcctatttcggatctngggaagtcttacgggcttccacagaagggcaacatggggctttagttcaantattgttgggggcgctncgggggcctgggggcaaagatggagcttgcct

SEQ ID NO: 902 - DNA, 482 bp, Homo sapiens
gtcactaaaggtttcaggcacagaactgtatatccaataatagtgaaatggatcccactaattatgacagaaatgatgatacatttaaatgacttggatgttttataggttggcactcatgatgagccgctgttctcattctgcaaatggtgaagctctctattgtcctgaccccacagttcctgtcgcatgaccagagccagctcaccaaggagctgcagcagcatgtaaagtcagtgacatgcccatgcgagtacctgaggaaggttatcaatagtctggctgtctatcgtcatcgtgagactgactttggtgtaggagttcgagaccaccctgggccaacatggcaaaaccccatctccacaaaaattggataatttgataattatcattattggggttctgaggacggtacaacatttaacattctcttctgcaacaagttgcctttgtgtgtctttcctgaggacttatcttctggg

SEQ ID NO: 903 - DNA, 509 bp, Homo sapiens
tttttttttgttttatataatttattcttatttgtgattacaagtatacctctacagaaagttagtatactcacacaaaggcaacttgtgcagaagagaatgttaaatgtgtaacgtctcagaaacccaataatgataattatcaaattatccaatttttgtggagatggggttttgccatgttggccagggtggtctcgaactcctacaccaaagtcagtctcacgatgacgatagacagccagactattgataaccttcctcaggtactcgcatgggcatgtcactgactttacatgctgctgcagctccttggtgaactggctctggtcatgcgacaggaactgtggggtcaggacaatagagagcttcaccatttgcagaatgagaacaggggctcatcatgagtgccaacctcagttttcttctgtgtgaaacaggaacaatagtttcattcgtcattcagtttctctcaaggtttcacgagatcatacgttacagtcaggggg

SEQ ID NO: 904 - DNA, 913 bp, Homo sapiens
  misc_feature (1)...(913): n = A,T,C or G
agcggccgcctcggagctgtttcactcgcatccagagggccacctgctgcgttctcctcatctgcctcttcctgggcgccaacgccgtgtggtacggggctgttggtgactctgcctacagcacggggcatctccacacgcccagcccgctgagcgtcaacacagtcgctgttggcctggtgtccagcgtggttgtctatcccgtctacctggccatcctctttctcttctggatgtcccggagcaaggtgggctggggctggggaccggggagtactgggaatggagcctgggcctcggcaccatgcccagagccgccactttccagtgctgcagccagagggaaaggcgtccaccaaaggctgctcgggaagggtcaacacacttgagcagccttagctagactgaccagggagaaagagagaagactcagaagccagaatcgtgaaagaacgagggcacttcgctaagcagacgccacggacaactgcacagcagcacgccagataactcagaagaagcaagcacgcggctgtgcacgcttccgaaatgcactccagaagaaaatctcaagtacatctatagcaagtgaagaggccgagttagtcccttaagaaacctcccaagtggccgggccgggtgtggtggctcacgcctataatcccaacacttcangaggccnaggtgggcggatctgantccagnagtttgagaccagcctgggcaacatancaagaccacatctatataaaacattaaaaaggaccacgcacggtggctcacgccttgtaatcccaacactttgggaggccgaggcgggcagatgagttgaggtcaggagttcnanaccagcctggccaacccaatgaaacccccgtctctnctacnaatacaaaaancttacctggggcat

SEQ ID NO: 905 - DNA, 1916 bp, Homo sapiens
  misc_feature (1)...(1916): n = A,T,C or G
ggtggagatagagcatagctggcgatcatgtgtacttacactctaaggtcacctggttgcactatggcctcatctgtggctctgaaaatgaagatttggaaggagatcatcacagctaatgtttaacaagcccctcctgtgtgccaaatcattcacccctcaccacaaccgaatgagctaaggattctcattatatatagtttatggagagggaagtgcagacataaagaggtgaattatcttacccagatcacacagctgataagtggtggaggcagaatagaatctaaacagtgtggctccggagcccacatgcattgattcgacaagtgtttattgagcacctgccacggacaaggccttgtgtgattaaatagggttataattagtaatataaaaatgagaaatcactaatgctttttagacttaacattttctttttttgtaggtttcaggcacagaactgtatatccaataatagtgaaatggatcccactaattatgacagaaatgatgatacatttaaatgacttggatgttttataggtatgatctcgtgaaaccttgagagaaactgaatgacgaatgaaactattgttcctgtttcacacagaagaaaactgaggttaaaaggggtaaagtaattttgcatggcatgaagtagaaattcaaagtacaggaatttgaacttggttctgtccttttctgaagcccttgaccactatagactcaaacatcaccttgtttttccactcattcaacacttttttttttaaattatctaataggttggcactcatcatgagcccctgttctcattctgcaaatggtgaagctctctattgtcctgaccccacagttcctgtcccatgaccagggccagctcaccaaggagctgcagcagcatgtaaagtcagtgacatgcccatgcgagtacctgaggaaggtgagtgagtgcagacagatggggcctggtgcccttgagcagttcccgggtctcagctgccacacatctcatagccggtgatgctgggggaagcttacgcagtcacagtactggcttcttcctctttttctttccatacaagtggcttagggatggggtagagtagttgacttatttggatgaaaaccactatcttctgtcagaaactccaaaaggaatcattgctggcatggtaacctaaagaaaaacaaccagacaagtgcccaacgacacttaaaaaggttatttattatcttgccaatttaggctnggcatggtgactcatgcctctaatcccagcattttgggaggctgaggctggtggatcacgtgaggccaggacttcgagaccagcctcaccaacatgccaaaaccccgtccctaccaaaaatacaaaaattagccaggcatggtggcacaagcctgtaatcccagctactcaggaggctnaagcacaacaataccttcaacctattaagcgaagtttgaagttatccgatatcgtcccatttcactccancctgcattacaaaatggaatcagacactgtctcaaaaaaaaaaaaaaaaaaaaaaaaaaaagaaccctagatttcggttgtgttggttgtaaaaggagagacccagtaagtgggggtcgtgccgcagattgctacccacaatggacgggtcactgagcaggtccggccaactgggcgttccctcgctggagggccagcacaccagactgcaggtggcgcgggtcagcaaggtaccaggggatgtgtcacacacacagcccacccccgtccagtcacgcacggacaccctgggcttccgagcaaacctgctcccaggtggtgtgaccacatggagccacagacacccagcaaggacacgcagcccgcacacccccgtacaccagacacagtgacctgcaccaggggctcgag

SEQ ID NO: 906 - DNA, 2192 bp, Homo sapiens
atggcggcgcgcaccctgggccgcggcgtcgggaggctgctgggcagcctgcgagggctctcggggcagcccgcgcggccgccgtgcggggtgagcgcgccgcgcagggcggcctcgggaccctcgggcagcgctcccgcagttgcagcagcagcagcacagccaggctcgtatcccgcgctgagtgcacaggcagcccgggagccggccgccttctgggggcctctggcgcgggacactctcgtgtgggacaccccctaccacaccgtctgggactgcgacttcagcactggcaagatcggctggttcctgggaggccagttaaatgtctctgtcaactgcttggaccagcatgttcggaagtcccccgagagcgttgctttgatctgggagcgcgatgagcctggaacggaagtgaggatcacctacagggaactactggagaccacgtgccgcctggccaacacgctgaagaggcatggagtccaccgtggggaccgtgttgccatctacatgcccgtgtccccattggctgtggcagcaatgctggcctgtgccaggatcggagctgtccacacagtcatctttgctggcttcagtgcagagtccttggctgggaggatcaatgatgccaagtgcaaggtggttatcaccttcaaccaaggactccggggtgggcgcgtggtggagctgaagaaaatagtggatgaggctgtgaagcactgccccaccgtgcagcatgtcctggtggctcacaggacagacaacaaggtccacatgggggatctggacgtcccgctggagcaggaaatggccaaggaggaccctgtttgcgccccagagagcatgggcagtgaggacatgctcttcatgctgtacacctcagggagcaccggaatgcccaagggcatcgtccatacccaggcaggctacctgctctatgccgccctgactcacaagcttgtgtttgaccaccagcccaggtgacatctttggcttgtgtggccgacatcggttggattacaggacacagctacgttgtgtatgggcctctctgcaatggtgccaccagcgtcctttttgagagcaccccagtttatcccaatgctggtcggtactgggagacagtagagaggttgaagatcaatcagttctatggcgccccaacggctgtccggctgttgctgaaatacggtgatgcctgggtgaagaagtatgatcgctcctccctgcggaccctggggtcagtgggagagcccatcaactgtgaggcctgggagtggcttcacagggtggtgggggacagcaggtgcacgctggtggacacctggtggcagacagaaacaggtggcatctgcatcgcaccacggccctcggaagaaggggcggaaatcctccctgccatggcgatgaggcccttctttggcatcgtccccgtcctcatggatgagaagggcagcgtcgtggagggcagcaacgtctccggggccctgtgcatctcccaggcctggccgggcatggccaggaccatctatggcgaccaccagcgatttgtggacgcctacttcaaggcctacccaggctattacttcactggagacggggcttaccgaactgagggcggctattaccagatcacagggcggatggatgatgtcatcaacatcagtggccaccggctggggaccgcagagattgaggacgccatcgccgaccaccctgcagtaccagaaagtgctgtcattggctacccccacgacatcaaaggagaagctgcctttgccttcattgtggtgaaagatagtgcgggtgactcagatgtggtggtgcaggagctcaagtccatggtggccaccaagatcgccaaatatgctgtgcctgatgagatcctggtggtgaaacgtcttccaaaaaccaggtctgggaaggtcatgcggcggctcctgaggaagatcatcactagtgaggcccaggagctgggagacactaccaccttggaggaccccagcatcatcgcagagatcctgagtgtctaccagaagtgcaaggacaagcaggctgctgctaattcccttgagaacttccaagcctccggcatcttttcctgggccttgtggcagtgccagtgttcggggggtgtctgggccactgagtacccactcggtcgtggttgtgctggcctcttggagtga

SEQ ID NO: 907 - DNA, 581 bp, Homo sapiens
gcggccgcccagtgcgccgccgtccagccgcgcgcgtcctccgcctccgctgccgcgggtcccgggcccggagcctccagcaggcgcgcggccagcagcgtgtggcccagggcagcggcccagtgcagcggcgtgaggcccgtcccggagcgagccgccgccgaggccccgcgctgcagcagcagctcggccacccgcgagtgtccgtgccaggcggcctcgtgcagcgcggtgcgccccgcccggtccaccgcgcccaccggggcccctcgctgcagcaggagacgcaccaggggcgcgtggccccgcagcacggccagaaggaaagctccgtaaggctgaccgggaaagaagcgaggagctctgggggctgggtggaaagtcccgtactcatcagggccagggaggccacagaaactacctcacgccagcttccccggggtacagcggctagaatggacctcgaggaggcccctcccaagactcccgtctcccgggttccaccgcagtgggggcagccacagctgcctctgcaatgcttgtaggacccacacacagtggggcacggagggcagagccgc

SEQ ID NO: 908 - DNA, 409 bp, Homo sapiens
  misc_feature (1)...(409): n = A,T,C or G
gcggccgcctgcacttgcgctggggactcgctggactgcggtgggcgcgggctggctgcgttgcccggggacctgccctcctggacgcggaacctaaacaataataacaacaaaacatctgaaacataccctgccgcttcttaataacatcccaacccacactaactgcagcacaacaagattcgcagcgtggaggggagccagctgaaggcctacctttccttagaagtgttacatctgagtttgaacaacatcacggaagtgcggaacacctgctttccacacggaccgcctataaaggagctcaacctgncaggcaatcggattggcaccctgnagttgggagcatttgatggtctgtcacggtcgctgctaactcttcgcctgagcaaaaacaggatcacccagc

SEQ ID NO: 909 - DNA, 230 bp, Homo sapiens
  misc_feature (1)...(230): n = A,T,C or G
ccagcttcctgtaagagcattcaagctacccaggctgacacaactggacctcaatcggaacaggattcggctgatagagggcctcaccttcccaggggctcaacagcttggaggtgctgaagcttcacgnnaacaacatcagcaaactgacagatgggggcttcttgggactgtccaagatgcatgtgctgcacctggagtacacaagcctggtagaagtgaaagggggt

SEQ ID NO: 910 - DNA, 532 bp, Homo sapiens
  misc_feature (1)...(532): n = A,T,C or G
ccacccccgggaggagcgcgcgggcacagggtgccgctgaccgaggcgtgcaaagactccagaattggaggcatgatgaagactctgctgctgtttgtggggctgctgctgacctgggagagtgggcaggtcctgggggaccagacggtctcagacaatgagctccaggaaatgtccaatcagggaagtaagtacgtcaataaggaaattcaaaatgctgtcaacggggtgaaacagataaagactctcatagaaaaaacaaacgaagagcgcaagacactgctcagcaacctagaagaagccaagaagaagaaagaggatgccctaaatgagaccagggaatcagagacaaaagctgaaggagctcccaggagtgtgcaatgagaccatgatgggccctctgggaagagttgtaagccctgccttgaagcagaccgtgttgaagttttacccacgcgtttgcangaagtggcntaangccttgntttggccgccagcnttgaggagttnccttgaaccagagcttcgccct

SEQ ID NO: 911 - DNA, 358 bp, Homo sapiens
caaatactggttaattagcaatttaagaccagagccagattattccaagagcataccttcttttgggtttcctaactttgggaaaaaaaatggtgccgctggttttaacccacgtttttataggacctacttctttggagataacccgtattggagggatgatgaaaggggaccgatgatggaccctgggttttccaaactggtttccaagaaccttccagggattgggccttaaattggtggcagcttctacttttaaaaccaatactactatttctttcaagggtctaaccaatttggatatgactttctacttcaacgtatcacccaaacactggaaagcaatagctggtttggt

SEQ ID NO: 912 - DNA, 1055 bp, Homo sapiens
gtcttttatttaaaattttagaaggttaagaccttacggaccacctcagtatatgcccattcctaatagaaggaggtatgacgggtttcaaactcgtgcagagctgcattttcatttacaagtctctgtaggcactttagaagtgaagcttggcttcaaaatacaaacactgggggctttggctcaaccttttaatataaaaaaattcactgatgtacaaaaatttgaaagtgtgacaatgacaattatgaaatcctgtgactgaaagtcccctcgagtgcactctgtggtgcacatgcgcccgcccacacaaactctggcatggaaacataaactaatgcaaaccagtgctacccagaagcaccaacacgtgtgttctccattccaccaatcacagaccagtatctactccaaacatcagttaacgaaactatggcatccttccaggaaccgccagggcgggctctttattccggttgacccgccccgattaaccccgccaaaagaggacttgcttccttaaatttagggttgtcactcctgggggtcggcaccaatcccatattagggacaaatctcctgggtcttcccacaacatcctttttctctcgccaatggtggccttgtttatagaggcctcgggcatcaaccgcattattatctcctttggtgcaaaaacttgatatgcccattttgcttttcatgaatcttcaagactcggtgaactataggaatctctcttccttctatcctaaaaacaacaatttctcccactcgtatgggatcttcaactcgatttgttagaaagagaagatctcctctatgaaatgcaggttccatgctgccactgagcaccactacaatcggactttcacttccagttattaccattaaccccttccagatcattagtgccgatgagacaatcattccaaaatttaggacttgataatagagctgccgcttgttcatccgccgcacatcgtccaaaaagtctagagacagcatggcggggacgggcgagcaggacacccggacgcggggcggacgcgggg

SEQ ID NO: 913 - DNA, 298 bp, Homo sapiens
ggtggggggggtaggggaggtatttcttgccaaaagggagctttttggggaaaactcctttcgggaaaagttttttggcttctttttcagggatggggggaaggaccatcacactatccccatcctttcaattaactgggggggaaacccttttttctgtgtgcagctgggaaaaaatgactcccctgaaaatctcattaaagttcccgccagtggttgctgggtgaagaatagaacgctttactttttttttaggaccaaaaaaaaacaccccaccagcggtcacagggtgcccttt

SEQ ID NO: 914 - DNA, 500 bp, Homo sapiens
  misc_feature (1)...(500): n = A,T,C or G
gtccggttctagatcgcgagcggccgcccttttttttttttttttttttttttttttttttttttttttttttttttttttttttttttttagggccnttttcatttaanaagccattggnntagcancctaaaaaccttggntgggnngaccccnggatgggtttatggaantggtgnaggaaaacncaattgggagntgncatcctntggntcanancaccngnttttccaananacttaaggntggggggggtagcggnggtnttttttgccnnangggngctntttggggaanacnnctttngggaaaagnttttnggnttnttnttnanggntgggtggaaggnccnttacactntncccatccttncaaanaannggggggggaacccttttttttgctntcanctggnganngnngaccaccctgggaatttcatcaaanttccnnccnangggagctnggtnagggaanaanngnttcannttttttttagg

SEQ ID NO: 915 - DNA, 926 bp, Homo sapiens
  misc_feature (1)...(926): n = A,T,C or G
cctttttntttttttttttgagaagtagctacagtttaatacaaacctgcaccagaacacaacgtgtcgggctgtttagtttttgcctcaaacggtggccaaagcacaggaccatgtgtcgtcttggggttgacacagtcttagcaccatgacatttacaggggagtggggaagtcacctgggtgctggggtgctggaggctccatccgaccccaggctgtgcctgcgcctcagcagctggagggggtttgggtttccttgtggttctgtggcttctgggtcagtatcagaaaagccctcatcacgacatcggcttgacagagacctactgtggactcctagcactacacacacgcacgcacacgcacacacagtagcacaattttctggcaacttaaccccacaaacctagagagcagctaaggcaagaacaacagtatttattcagcaagtacaagaccagtttgagagctgcattcagtgcaaccagagaccctttcgttccaaccaggagccagtggggctggtgacgaagctggctggagctctgcacggggcaaggagtgcatggtgggggctgaccgctcatttggctccttgaatctctttctgatttctatctagaagctcccgggcaagggtagggcctatgtagggactgggggtggatgaagcgcatggcctacagtggaccactccaagacgtggttccctgggtgccacgggtcacacatctctcaggcggaggcactcagagaaggtaaagctttcctagcccaagcaaggatgctctgcccagctggccaccaccgctgctgctgggctctttgacatctgcccaaggcccatgacccagtgagggctgacagggatagagatggtgtgcactgcccaggaggcggcgtcatggtttcccccatccctgg

SEQ ID NO: 916 - DNA, 587 bp, Homo sapiens
tttttaacttaagtaaactttattttcaaaatgcttcaggtacaaaagaaaacaatggcaaagtctaacaataattaacaaaccagctcttgagcggcagagtgctccagggatgagaggggctggggatggaaaggtggttgggagacacaacatttttctagcttcagaaagtcagggagcccagatcacagcctgaacatcatggtattggttacagattctttacaaaggtgtttacctctctcatgaggtcttcttgtttggttacttcctcagaaaaatcatcattgacatccaacaccagcactggaatgttcatcagagcctcaaagtggagcttcgttgtcttgtgaataagccaggcttcgtgttggccatgcaactgctctagataggccagctcaattcctttctcctcctccctggccctctggtacagtctcttcaaacaaaccaatgttgccttcgatggagagccttcggggcccgcgccccgcgtgcaggcctctggaggaggaaacgccctcgagtgggctcttggccatggaactgaagggtgctcgaaaccgacttagaaagaggcg

SEQ ID NO: 917 - DNA, 1003 bp, Homo sapiens
ctactactactactactactactatttttttttttttagaaaaacaagtttaacttaagtaaactttattttcaaaatgcttcaggtacaaaagaaaacaatggcaaagtctaacaataattaacaaaccagctcttgagcggcagagtgctccagggatgagaggggctggggatggaaaggtggttgggagacacaacatttttctagcttcagaaagtcagggagcccagatcacagcctgaacatcatggtattggttacagattctttacaaaggtgtttacctctctcatgaggtcttcttgtttggttacttcctcagaaaaatcatcattgacatccaacaccagcactggaatgttcatcagagcctcaaagtggagcttcgttgtcttgtgaataagccaggcttcgtgttggccatgcagctgctctagataggccagctcaattcctttctcctcctccctggccctctggtacagtctcttcaaacaaacctggggagaagcctggaggtagatgaagccatgtaatgtgatccggctggcaaactcccacaggagaaaagaatgccagtcctgatagatatgccactcgatgtcactgagggaaccattttcaaaaagattctttgcaaagatatacctgtcactgtacacagacctctcaaagatctgtactggcttcctggcctgtaagagtttctcagggaagggctccagctgtactttcaggcggctcaaaaaggaaaatgtctggaatgtgtaggaccatcgtgctggctcccggtacatcatatccagcaagtttccaagactttgggcagtgcaggccaatgttgccttcgatggagagccttcggggcccgcgccccgcgtgcaggcctctggaggaggaaacgccctcgagtgggctcttggccatggaactgaagggtgctcgaagccgacttagaaagaggcggcccgcggccatcccacccaggacgcgcggagcg

SEQ ID NO: 918 - DNA, 599 bp, Homo sapiens
ttttttttgcaatacctagtatttttattaattaacttgataattgttgatgtttgatgatttttctccatgtaaatattcaatgcgaaatgtttatctaggatttgaatttaaatgagttccacagatagtgtgcgagtttttccttacatcttccttgcacagtagaagaaggaaggaaccgtttagatcagttatagtttcattttgcctagccaaagatccggaatcattaatccactcccacactctgacattccagtcattacctagttctttcaaaaaacatgtagtcaatgaggaaacaggcaccaatcatcacggctttcattttaacatcaaggtctctagggaattggattccaaagttgtcagcatcagtaaatgcctctcttaaaaacccagaccagtgcttagaaatcctgccaaccacaatttgttcatcaagagatgtaatctcaaaatcaacacccgcaatacagctgcacacgatacatggaccactaatttttagtacatcctctctcttctgatgtttaattgtagaactttgttagacatggggtgccagtctgagtaacatacctactggttacacc

SEQ ID NO: 919 - DNA, 287 bp, Homo sapiens
  misc_feature (1)...(287): n = A,T,C or G
aattgaacttctggaagtnttaacacggttttgaaactaataacaaatntgaaattaanaacagctttggacagagggtttactttgcagcggaagatactgattgctgtacccgaaattgctgtgggccatctagaccttttaccttgaggattattgataatatgggtcaagaagtcataactctggagagaccactaagatgtagcagctgttgttgtncntgctgccttcaggagatacgaaatccaagctcctcctggtgtccaataggttatgttattcag

SEQ ID NO: 920 - DNA, 846 bp, Homo sapiens
caagactccggtaaatgactgcgtcaatggcaaggaagtcagtcactgtggctgagtatagttttccatctgcaaacagtgcaacgttggcatgtttggcatcatatgggcatctggccattccgctgaattcatccccgaatggttccaatgtatccatcttatagtttctgcaggaagggttgaaggcattagttccacagacaaacaatgcatcatcgtttttctttagaagaactttaataaagttgtggcactcatccttatgttttcccttcattctgcatgtgtctacatcggcctgtctagatttccatgtcagttttttgctacaataaatttcttccgtgtgtgatgtgtctatatcaacagtataaatatggtccctagcagcaatgtagagggttccgttcatgatcataatcatctggatgtccagcctgtgcctctgtgtggtgttccgtcctggcttgtggcccacaaacaccggatactgttttgtatagttgccatgcgaaatactgattggctcagaatcttctgggaaaccagccccagcaaagtgtagcagtgtgaaatatagcagcaaggcttctgacctcatagtagttcagcggggagactttatttctctacttcacccttttcggtgcatcgacggacaggcggccggggctcggagcgaactggtacagcggtgtatcccatttagtaatccattatcgaggggatctctccgggccgcgggctgcgctctctccttcgcaagcctttgtcattcctacatgtgtgcttgtctctttgggggaaatagtcgcggcgactactttctggcggacgcgtggc

SEQ ID NO: 921 - DNA, 657 bp, Homo sapiens
  misc_feature (1)...(657): n = A,T,C or G
agggagtcgaccccgcgtccgggaaccggcggcgggagtcgcggtcccgttcgcgctccaccaacacggccgtgtcccggcgcgagcgggaccgggagcgcgcctcgtccccgcccgaccgcatcgacatcttcgggcgcacggtgagcaagcgcagcagcctggacgagaagcagaagcgagaggaggaggagaagaaagcggagttcgagcggcagcgaaaaattcgacagcaagaaatagaagaaaaactcatcgaggaagaaacagcacgaagagtagaagaattggtagcaaaaagggtggaggaagaactggagaaaaggaaggatgaaattgaacgagaagttctccgaagggtggaggaagccaaacgcatcatggaaaagcagttgctcgaagaactcgagcgacagagacaagctgagcttgccgcacaaaaagctagagaggaggaagaacgtgcaaaacgtgaggagctagagcgaatactggaagagaataaccgaaaaattgcagaagcacaagccaaactggccgaagaacagttgagaattgttgaagaacaaagaaagattcatgaggaaaggatgaaactagaacaagacgacacgtcaacaaaaagaagaacaaaaaatttctgggcaacaggaggna

SEQ ID NO: 922 - DNA, 4080 bp, Homo sapiens
  misc_feature (1)...(4080): n = A,T,C or G
cgtccggccaccagtgcacccgcagctgccatcttaggggcgcctggcgctacgggtttctcgttggaggcggccttcgtggcagctgtagacgccgggaaaaggcataaagtccgttggccgacacctttctttcctccggcctcggtagaaccgccagcccgcgtccgaaggcggaggcgaggggaactggccgcgtgaggggcctgaggcgagcggttagagcgtctcccggaaggatgggccggtctcggagccggagctcgtcccgctccaagcacaccaagagcagcaagcacaacaagaagcgcagccggtcccggtcgcgatcccgggacaaggagcgcgtgcggaagcgttccaaatctcgggaaagtaaacggaaccggcggcgggagtcgcggtcccgttcgcgctccaccaacacggccgtgtcccggcgcgagcgggaccgggagcgcgcctcgtccccgcccgaccgcatcgacatcttcgggcgcacggtgagcaagcgcagcagcctggacgagaagcagaagcgagaggaggaggagaagaaagcggagttcgagcggcagcgaaaaattcgacagcaagaaatagaagaaaaactcatcgaggaagaaacagcacgaagagtagaagaattggtagcaaaaagggtggaggaagaactggagaaaaggaaggatgaaattgaacgagaagttctccgaagggtggaggaagccaaacgcatcatggaaaagcagttgctcgaagaactcgagcgacagagacaagctgagcttgccgcacaaaaagctagagaggtaacgctcggtcgtttggaaagtagagacagtccatggcaaaactttcagtgttgggttctgcctcctgctcagttcagaaagagatggaatacagactatctaattcctttctcgtctaaacttaacattgctgcgaaagttaattttttagcctattcagaagtgctgactgataacttaaaagttggaagcttttataaaacatattcaaggatactttttgatttaatggaactggctatttgagaagtgtttgaaacttttgccatggctgcaggacttacattcttttttgggaggacggtggggagacagggagtggtaaagggaaaaggttaaaaatccacctgtggttgtatattcttctattctgtcactctgttacctagactgtgagaggcttttgccttcagtcagattaaaaagagcagggcctaacattgagtgatagcacctgctttgataaataggttttctcactcttctttttttccttcttttatccctcactccctcccctaaaccctgcttcagcacaatggactaattctagcattctgatcataaggccctccattttcctaatgtgtttcaaggaatctttttaggaaaaatatccagattattcatccactttttttagtatctactaacaactcctttttttctctagagagttatgaaggaacaggttgtccttgtctggagtcaagctaaacacatgatttgttttatcagcagctggagcagaagttgaaaatgtctttctgtgagacagtaatttgctactgaagctttatggcttgtttgcactgattactccaggatccaaaaacttggtgaaagtcactgaaacactcaaggcaaattactttacagccctgagtgtctgtcaccatagtttgcataatgaatatgaatcccattggtgtgtgatgtaggaaatcctgtagttgtattttcttgaactgaaatatttgactcaaaataattaagactcattgtcatttttcatcttggcattattgtggacaagttgacatattaaatctctttgctttctggtaagcttagcttttaaaatgcattttcccttgtcctgtctttaactagatatacatgcttatatttatagtgggtttcacagactataaaattgaatgtatgaaatttttatttatatcagtgcttttaataatgaagatatttttggagtaatggtgctgtcttgtagcgagttattaatcatagtaagatttttttctcttcatttgctttttttgtttcatattaacaattttttttttacacggacacaaccctctgacagtctttccaaatattaaaatcatttgaatatgtatgctgtgatctgaacactgctcaagccatcaagcagtcttcatacagtttgcattataaaatctcattaaattctccaagaaaaaataagttgaagaattttatttcctgaccatgcatcccctggatttctgagtttcagttcagattgtagatgacaatataagctgccttccgaaattgtcaacatctgaatgttaagtccattttccccatggaagaagcccgtagttccatgaagtatggattaccatttgtatttttcactaacagtaaatgtatttttcttattaattgtttgccttaggaatgatgaattacattttttgttccttcttaccataaacatctgcattcctcagctcagccttccttgtatgttgtttctttataaatggttgagctgctgatgcaggtattgccaagctaacagtacaaatcattttaaagaggaagctggcgcgtatggcagccgaggagcacactctgcaggacactggacaagacagtaaatattcaacttttaatgctgattaaaggagtataggtaaagaatacgtaggtatacataattggtgagacaaatattcactttatttatattttatatattatttttttaatttggtaaatactatccagttttgtagttgtccttgttgatttgtgtgatattaaagtattagtaataattgccaggaaactatcattagggagggtttagttggttgctgtttggactgggagggatgatttaaatttagtgctagaaaccaattttagtgactgcacagtttatcatttgtcagacagaaggtagctataaagctaccctgtaagtcatatcaaaaaagttcagaggaagattagtaaatatttatcaataaaaataaacattttgtttttctaatatcttaacatatcctcccctttaggaggaagaacgtgcaaaacgtgaggagctagagcgaatactggaagagaataaccgaaaaattgcagaagcacaagccaaactggccgaagaacagttgagaattgttgaagaacaaagaaagattcatgaggaaaggatgaaactagaacaagaacgacaacgtcaacaaaaagaagaacaaaaaattatcctgggcaaggggaagtccaggccaaaactgtccttctcattaaaaacccaggattaaattgcaaactctgaactttttacaaagaaaaatggaaaaactttgtatggtagcttcatgttgaagtggttttttgtttttgtttttgtttttttaatttgtaaaatctggaaagttagcttgttctaataggggctatgctctgcaattccctttttttttttttttttccttccactaagtcaaatccttatcagatcattgttgtattctaaggagtgacgtatttttcacctgtttggattctatattagtggtctgaggaagagcagatcacattgtaaaactatggatggtctgataaggcttttactgaccccactgacttcagagttatactctgtttgctacatcataatgctggttttgctgactttttgtttttttatatatttataaaaaaagaaaaagttggtgattgcattgggaaattcccagggtattactggacctatgtggtgtattgttaaaccagtgtccttgtgatactgttgctcttgatgttcctgatacaggtaaggaaacagttggtcaactctgatacaaagtatatatacagttcagtattgtctctgttcattttgtttttatttcattgacaaaatcaaaccagcattccccattgtgtaaataaatgattttgctgaataaagtaaagtcttaaattcaaaaaaaaaaaaaaannnnnnnnnnnnnnnnnnaaaaaaannnnnnnnnnn

SEQ ID NO: 923 - DNA, 401 bp, Homo sapiens
  misc_feature (1)...(401): n = A,T,C or G
cgtccgcggacgcgtgggcgngcgcgcaacggcggcgacggcggcgaccccaccgcgcatcctgccaggcctccggcgcccagcgccccacgcgcccccgcgcccccgcgcccccgcgcccctttcttcgcgcccccgcccctcggcccgtcaaggcccncttgccggnnacccgncaggccccgcgccggancgnccgccgtccaggaccggtccgcgccccgcaggccgtncgtcgnnccgcgccgncatgggagtggagggntgtnccaagtgcntnaagtacctgctntttgtaattcaattncgtcttctggntggctggnggcgtgatcctgggtgtggctcntgtggctccgncatgacccgcagaccaccnaccctnttgtntctggagctgg

SEQ ID NO: 924 - DNA, 751 bp, Homo sapiens
  misc_feature (1)...(751): n = A,T,C or G
atttggccctcgaggccaagaattcggcacgaggcggccggttacggaatgggatgatgatggccaccttgtgaggagagacacagtccttgggggagtaacggccgcccgtctttatctctgggttcttctttgccaaaagctccagatccacagcaatattaaagtcaatcagcatggggccaacgagcagcggggactcctcagggcaagctggcagcgacaacagtccagtggtggtgggcactggcaacgaagacaagttgctcttcaagccggggccagaagctgcaccagggctggagtcgagacccgggcgaggcttcggggagacgcctaaaggaggcggcggccgcaagcttannnnnnnnnnnnnnnnnnnnnnnnnnnnnnnnnnnnnnnnnnnnnnnnnnnnnnnnnnnnnnnnnnnnnnnnnnnnnnnnnnnnnnnnnnnnnnnnnnnnnnnnnnnnnnnnnnnnnnnnnnnnnnnnnnnnnnnnnnnnnnnnnnnnnnnnnnnnnnnnnnnnnnnnnnnnnnnnnnnnnnnnnnnnnnnnnnnnnnnnnnnnnnnnnnnnnnnnnnnnnnnnnnnnnnnnnnnnnnnnnnnnnnnnnnnnnnnnnnnnnnnnnnnnnnnnnnnnnnnnnnnnnnnnnnnnnnnnnnnnnnnnnnnnnnnnnnnnnnnnnnnnnnnnnnnnnnnnnnnnnnnnnnnnnnnnnnnnnnnnnnnnnnnnnnnnnnnnnnnnnnnnnnnn

SEQ ID NO: 925 - DNA, 609 bp, Homo sapiens
  misc_feature (1)...(609): n = A,T,C or G
ggagctctccccggtctgacanccactccagaggccatgcttcgtttcttgccagatttggctttcagcttcctgttaattctggctttgggccaggcagtccaatttcaagaatatgtctttctccaatttctgggcttagataaggcgccttcaccccagaagttccaacctgtgccttatatcttgaagaaaattttccaggatcgcgaggcagcagctgaccactgggggtctcccgaagacttatgctacgtaaaggagctgggcgtccgcgggaatgtacttcgctttctcccagaccaaggtttctttctttacccaaagaaaatttcccaagcttcctcctgcctgcagaagctcctctactttaaccctgtctgccatcaaaagaaaggggaaacagttgtacattggcccaagctgggcctggactttgggggcccaatttcttactataacctgggaccaagagctggaaacctggcttcttgttcctggttcaaggaagccctcattgtgtggggccagaccaaccctaaagccaggtaaaatgnttgtgttgcngtcagtccatggncacaaggtgctgttcacttcaactgctgg

SEQ ID NO: 926 - DNA, 1434 bp, Homo sapiens
tcaggcctcccgagcgtagatggaaggagcagatatgacataaatcccttgagggtctacatcttcagggcgattccaatctacggacgagctcggaccatccccggaaccctcctgcgtccttaggttgttgagtgcatccgggagtgcgtggactgacggctccggggtcccagccagcaagcgagacccagcatcctgggagtggccacggcggcgcacgtggaccagcaagagcgcagcgccggccacgcccgcggccacgagcagtcccagagccggaggcaaaaggtagcgctgagggtccccgggcctgaggcccggcggggccgcgggcaaggcgcttgcgccgtcggggtgcactgggaactcacaccgcgctcccatgtagccgggagcgcaagcgcagacgaggccggagaagtgggcgtagcagcggccgccgtgagcacaggggcgcgcggcgcacgggtccgcgcgctcgcggcagtcgcggccgccgaagcccagcgcgcaggagcagcggtgcgcgccgccgccctccacacacgtgccgccgttagcgcaggcgcggcccgcgcagtcgtccaggtcgtgctcgcagcgaggacccgcgaagccggcgcggcagcggcagcgcagggcgtggcccaggtccaggcagagtccgccattgcggcatggctgcaggctgcaccggtccaccctcttctcacagttggagccttggaaaccaggtgggcagtggcagatgtaggcagagtcagggtctgcacccccgacacacaagccgccgttgaagcagggtccatctgcacatgtcaccccgctcacctcacaccgcagcccgtagaacccacgcgggcaggtgcattcaaaggacctgggtgtctcactacagctgcctccattggcacacgggttcccgtcacagggcccaggcccagggacaaggcatccggtggtagcagaggacgggcccctggggctgaggcagctgctggtggagacagggaccgtgcagaggggtccagtccagccctctaggcatcggcattcaccgggctgttcacagaagccatgctcagggctgcagcctgctcggcacaccagcggcgcctcacattcgtcctcgagcggtgcgcaggggcgcagacccggaccgcaccgcgagggggcgctgcgcggacggcagaggcgcgtgcacgcggtcccgacggcaggcggctcgcagcgcgcgcggtacgagaagcgcagctcccaggcgcctgcgcgctgaatgtcccgggcccacgggcctccggctgccaagcgccgcctgccagccacgcgcgccagcaggctccaggcgggccctgtaattccagaattttgggaaagttgaggcaggagactcacttgagcccaggagttcgagaccagcatgggcaacat

SEQ ID NO: 927 - DNA, 2165 bp, Homo sapiens
  misc_feature (1)...(2165): n = A,T,C or G
taatctacaatctcttcgttatttttcttcctgcgacccagtttcgcttgaccctggagaggcggcgggcgggttggttctgcttctcagccatcccgggggctcctcgctagccaagagccggttcccgggaagccgcgcgcgcaatcgctttctcctcgtcgtcgtcctcctgggtccaggcgcggggacagagtcgccttcccccgctcctcggacgcagcgcngcggtggtgcctccggactgcacttgaggaggtcctcctagcggcctgtagtacaaaatgtcaaaaattagaaggaaggtcacagtggaaaataccaagactatatctgatagcacatcccgaagacccagtgtatttgagaggcttggacccagcactggcagtacagcagagacacagtgccgtaactggctgaagactggcaactgcctctatggaaacacatgtagattcgtacatggcccttcacctcgtggtaaaggttatagcagcaattatagaaggtcaccagaaagacctacaggggatcttagagaaagaatgaagaacaagcgccaagacgtggacactgagccccagaaacgaaatacagaggagtcatcctcacctgttaggaaagaatcttcaagagggagacatagggaaaaggaagacataaaaatcactaaggaaagaactccagaaagtgaagaagaaaatgtagaatgggaaactaatagagatgattctgacaatggagatattaattatgattatgttcatgaattgtcattggaaatgaagcgtcagaagatacagagggaattaatgaagctggaacaagaaaacatggagaagagagaagaaattatcattaaaaaggaggtttcaccagaagtggttagatcaaaattgtccccgtcaccttctctaagaaagtctagcaaatctccgaagcgaaaatcaagcccgaagtcgtcttcagctagcaagaaagataggaagacatctgcagtatcttctcccctgttggaccagcagagaaattcaaaaaccaaccaaagtaaaaagaaaggaccacgtactcctagtccaccccctcctataccagaagatatcgctctggggaaaaaatacaaagaaaaatataaagtaaaagacaggatagaagaaaaaacaagagatggaaaggacagaggacgagattttgaacgacaaagagaaaagagagacaagccaaggtctacttccccagcaggacagcatcattctcctatatcttctagacatcactcatcttcctcacaatcaggatcatctattcaaagacattctccttctcctcgtcgaaaaagaactccttcaccatcttatcagcggacactaactccacctttacgacgctctgcctctccttatccttcacattctttgtcgtctccccagagaaagcagagtcctccaagacatcgctctccaatgcgagagaaagggagacatgatcatgaacgaacttcacagtctcatgatcgacgccatgaaaggagggaagatactaggggcaaacgagacagagaaaaggactcaagagaagaacgagaatatgaacaggatcagagctcttctagagaccacagagatgacagagaacctcgagatggtcgggatcggagagatgccagagatactagggaccgaagggaactaagagactccagagacatgcgggactcaagggagatgagagattatacgcagagataccaaagagacgccgtgatcccagagattctcggtccactcgtgatgcccatgactacagggaccgtgaaggtcgagatactcatcgaaaggaggatacatatccagaagaatcccggagttatggccgaaaccatttgagagaagaaagttctcgtacctaaacaacgaacaagtccagaaatgagtctcgaagtgaaattagaaatgaccgaatgggccgaagtagggggagggttcctgagttacctgaaaagggtaaggtttttgacttgtctatgaactatatcttatatagaaagtataaaatctcctaagatttctaatatgttggattcttacatttgttatcattttgtccaagtaatttttaattaattgaacttgtagtcttccttatnaattcctaattggaat

SEQ ID NO: 928 - DNA, 834 bp, Homo sapiens
tttttttaacaaagaaactatattgatgataaagtacatttacacaaattaacatgcagatagaaaccgccttcaacttgcttctttctcaccatcttcacagtgtcgacctttaaacccaaggggacagaggcaaatgtaggagtcggctttgattgctgtgcaggtgccaccatggatgcacgaggcctcatcacagattccactgctgcattcccccacatcagccccactgagtgcttttcccaggggccagggcctcatgtcaattctcctcccattcacagcgagcgactgcacacagccttgaaagcctcggtttgtccctgttgctctaaccaacaagtaagcgctgggagcgccaccaagatagagaggtgtccggaaagtaattttactgtattggccctgagactggcctgtcactggggtgccattgttcagctgcagcagcccgttcagcccatctctgtagagcataaccgtgtgccaaccccctagtttgattttggtctcacttacgatgatggcaaccccagttccacaattaaacctgaactgcagggagcgtcggatgatagccagggacatgaaatcccccctcccgtgttcgttctccccacagtagagcagtaagccatcctctgcctccgccctaaattcaagagtaatttgaaatgcctgataagaattcttcagaggttcaaacggttacataggagtggccaaagaactgaggatactggataacaatatcttctgagcagctctcaccacctttgcccagggtgcactggcatcgcgagcccccccaggtgtagcggacgcggggtc

SEQ ID NO: 929 - DNA, 834 bp, Homo sapiens; identical to SEQ ID NO: 928

SEQ ID NO: 930 - DNA, 900 bp, Homo sapiens
cagccatgaaagtgccagtcagggaagtattcagtgctttgttgtagagttgttggatagaggcacaggatcatttcatgttgttgaggagaaaggagcaacagcctcctcccaccttattaaaaatagagatttaaaaaaacctctaatttcctcgaagtacagaatctcaagaggtagctctaaggagaattcctctgggttttgagcgcattcctcttccagggggcctattcttggactgcttttccttaatagagaaatctctctgagccaaaaatcggccttccccccaaattcccaatcttgtcggcccccactttttcttgctccggagacttccaaagccaagtccccaactccttccttcaagccaagtcgcgcccgcacccggcgcccggcagggccagccctctcctccttcctgcgtgcgcagcacaggccctgagcgcgcgaccccaggccctgggcgccccgccgcatgctcgcggctggaagccccagtttgcgtgggccttcgggttattccgctcaagagccgccgcgtcgccccatctcggcgcgaatctgaaagcgctttcgggggagaagatgttgggggcactgaatctcctacgacccggcgaggtaccccaggtacctgcctgaagcctactgcctgtgccggggctgcctgaccgggctgttcggcgaggaggacgtgcgcttccgcagcgcccctgtctacatgcccaccgtcgtcctgcgccgcacccccgcctgcgccggcggccgttccgtctacaccgaggcctacgtcaccatccccgtgggctgcacctgcgtccccgagccggagaaggacgcagacagcatcaactccagcatcgacaaacagggcgccaagctcctgctgggccc

SEQ ID NO: 931 - DNA, 1352 bp, Homo sapiens
  misc_feature (1)...(1352): n = A,T,C or G
ctcccgtgtgttatttaatcccttcaggagcccacaagatgggtgttattctcattttacagaggagggaggggagacgcgaagggattgcctggtctaagggcacccagcagcagagctaggacttccgccctaaggctgtgcctcactgccaccaggcacagccgcctccggaatgcacaggcgagtccctgccctccctcccaggccgcacaggtcctgccaagcctcacccagcacgggggagtctgtggtggccagtttacctgggcatctggctgagaggaagaaaggccaacctgatcctgaggggacccagacatatcctttgcactgtccctagaggggcgatgagctttgcagcattaaaaaatggtgaaggggggaaatattttgaaccaaagaccaaatgttaggccgccgttatatttgcagaagctttgagaaccatgcgtatagcctcctgcattctcccctctcctaggagctcttttgtccctccccccccgcgacccctaacccacccaggttagtgggcacaaatgagcggaatggatggatcggtggccccgctcgagggccactaccgggcttttaaaatggccccgagggtttacaggggggggggtacccccccaaggggggaccctctaagcccaccaggcgggcactttcagcccaaagcctccgggccacctcctcatcctcagcctcgggggccggggccttctgtttgagtccatcgaagtactttccggaaacatccgccagttcctccgccacggccaggtatgtgctgggctgggcggccagctcggggctcttgaccagcagccagaagatgggcccctgagtacagcctgactccaggcgtcagcaccacgtcctcttcctctgagacacggttttctcatccgccagcaggccctggcctgcctccccgacgcctgagagaagggcgttgacagtcacaccagaaccgtgaagcccccggctcacctccttggtgaagaggacgatggcgagcttgctctggcagtaggcggctttggtgttatacttcctcgtctgccagttcaagtcgtcaaagtctatgtgcccagcaacatgggccagggacgagaggttgatgatccgcgaaggggctnaggctttcagcttgtccagcagcaagtttgtcaagagaaagtgacccaggtggttaacgccaanctgcatctcgaanccgtcctcggtggtccagtgggggcaccgcatcacacccgcgttgttgattagaatgtccactcgctcctcctctcgtaaatnaagtcacatgctgagggatgggggttcaggatcggacgcgtggt

SEQ ID NO: 932 - DNA, 222 bp, Homo sapiens
  misc_feature (1)...(222): n = A,T,C or G
attntcgnctnttttttttcttttaaatgagcaagtttgagagtctgcagtttggactaccatgagaattgataggaaggtgggagtcccaggcaatcccaggtcctgtagcagcagctggtggggccatccactccatngtntgcagagcccngaactcaggctccctacctgtcatcacttctgcctccagggattttccanccacttaaagcagctgct

SEQ ID NO: 933 - DNA, 234 bp, Homo sapiens
gcggccgccatgcccgcagtacgttctagggggcggtgctggccgcagtggactggactgcaggtgagcactgccctgggctctggctggttccgtctgctctgctgccatcaagggagaggggccatctgatgcttcccctgcgaatctaaactggtaatggccgacgaggaaggggctccgtgcacttgcaggccacgtcaggagagccagcggtgcctgtcggggagggtt

SEQ ID NO: 934 - DNA, 487 bp, Homo sapiens
ccccgcgtccgtgccaagaggagatatttggaccagtgcaacaaatcatgaagtttaagtctgtagatgatgtgatcaagagagcaaacaatactacctatggtttagcagcaggactcttcactaaagacctggataaggccatcactgtgtcatctgctctgcaggctggggtgggtgtgggttaactgctatatgatgttgtcagcccagtgccccttcggtggattcaagatgtctggaaatggaagagaactgggtgaacatggtctttatgaatacactgagctcaagacagtcgcaatgaagatatctcagaagaactcctaaagaagccagcagagtaaagagaaactctcagcagtggctacacatctcctatagtaaccagcatagtcgtgttttattataatttcttctccagttgatttctttaagcaaaaggaattcattcagtgttactgtcactcataaaaaaaccatggtg

SEQ ID NO: 935 - DNA, 782 bp, Homo sapiens
tttttcaagtgcagaaaaactaaaatttattcagctaaaagcccattatgttggccattaattgaagctgaaaagcaaaaatatactatgatctacgatggttagcaaaagcgtaacttctaattatttaagttaattattcttatggtagaaaattacatgttcattaatcttatgctgtgtatatagcagagtggcaaaggggaaaaatgacttatctagtcaaaacctaagttacattgtgtctgaagaacctacccattttggaatttagaaatgaccataataggcccaaaggattcctctttggcgaggtacatgtagtcttccacatctgtgaacacggtcggctccatgaaaaagcctggcctttggacttgtcttcccccgtacaccaaagtggccccttctttcactccagtttcacagtattgcagcagcttttccagatgagccttatgattttggggcccatgatcagtggatctgtcaagtggatcaccaattttcatctttttaatttcttctaccactcttgtcacaaattcgtcgtggatggattcttccacgaacaaccgcccagcagcaatacagttctctcctttgttgaaaaatactgctcccatgcccattcgcacagccttgtcaagttcacagtcattaaatattataagtggagacttgccaccaagctcaagggaaactttcttcaagttgctaacagcacagctcttcatgatctgtttgccaataggagtggatccagtgaaaccaagtttgcg

SEQ ID NO: 936 - DNA, 824 bp, Homo sapiens
cgtcccgaagaaattaaaaagatgaaaattggttacaccttgacagatccactgatcatgggccccaaaatcataaggctcatctggaaaagctgctgcaatacctgtgaaactggagtgaaagaaggggccactttggtgtacgggggaagacaagtccaaaggccaggctttttcatggacccgaccgtgttcacagatgtggaagactacatgtacctcgccaaagaggaatcctttgggcctattatggtcatttctaaattccaaaatggggacatcgatggagtgttgcagcgagcaaatagtacagagtatggtttggcctcaggggtttttacaagagacataaacaaagctatgtatgtgagtgaaaaactggaagcaggaactgtttttattaacacatacaacaagacagatgtggcggccccatttggcggagttaaacaatctggctttggaaaagacttaggtgaggaagctctaaatgaatatctcaaaaccaagacggtgacactggaatattagagcaacaccatcatcaggaaagccttgacagacagccctttacaactctggacacacttaagaagattgggtgtgttgaggcaggaggtgtcagccacaaaccaaaaaatacacagatggaccatgaagagggccaggccatgttaaagcatttacacatgtgcctgagtattttctaatacaccttccagtgatttggagttgttgcattttgactatgttgtatatcatacgtatttctaaaataccaagctgtttctccctcgtgccgaattcttggcctcgagggcaaa

SEQ ID NO: 937 - DNA, 535 bp, Homo sapiens
  misc_feature (1)...(535): n = A,T,C or G
cccgcgtccgggaaaagcttgttggagcttggaggaaacaatgccattattgctttcgaggacgcggacctcagcttggttgttccgtcagttctgtttgccgccgtgggaacagctgggcaaaggtgtaccactgtgaggagactgtttttgcacgaaagcatccataatgaagttgtggacagactgagaagtgcctactcacagatccgtgttgggaacccctgggaccccaatatcctctatggaccgctccataccaaacaggcagtgagcatgtttgtgagagccgtggaagaagccaagaaacaagggggcacaagtggtctatgggggcaaggtcatggaccaccctggcaatttaccgtggaacccaccattgtgaccggtcttgcccatgatgcgcccattgttcaccaggagacttttgccccaatcctttatgtctttcaaattcaggatgaagaaaagaggtcttttgaatggaacattgaagtaaaacaggggactttnaaggaggtatctttaccaaaga

SEQ ID NO: 938 - DNA, 509 bp, Homo sapiens
gcgtacgctcagtcgtaaagaggaaaggcagaatttttccttgctatggctggaacaaacgcacttttgatgctggaaaacttcatagatggaaaatttttaccttgtagctcatatatagattcttacgacccatcaacaggggaagtgtattgcagagtgccaaatagtggaaaagacgagatcgaagccgcggtcaaggccgccagagaagcctttcccagctggtcatcccgcagcccccaggagcgctcacgggtcctgaaccaggtggcggatttgctggagcagtccctggaggagtttgcccaggccgagtctaaagaccaagggaaaaccttagcactggcaagaaccatggacattccccggtctgtgcagaacttcaggttcttcgcttcctccagcctgcaccacacgtcagagtgcacgcagatggaccacctgggctgcatgcactacacggtgcgggccccggtgggaagtcgctggtctgatcagcccctgga

SEQ ID NO: 939 - DNA, 390 bp, Homo sapiens
  misc_feature (1)...(390): n = A,T,C or G
nncaggcttttgtcaagcagcacctttgtggttcccacctggtggaggctctctacctggtgtgtggggagcgtggcttcttctacacacccatgtcccgccgtgaagtggaggacccacaagtggcacaactggagctgggtggaggcccgggagcaggtgaccttcagaccttggcactggaggtggcccagcagaagcgtggcattgtagatcagtgctgcaccagcatctgctccctctaccagctggagaactactgcaactagacccaccactacccagcctacccctctgcaatgaataaaaccttttgaatgagcacaaaaaaaaaaaaaaaaaggggnggcntannnatannnnnnncnnnccnctanactaantctannn

SEQ ID NO: 940 - DNA, 1384 bp, Homo sapiens
  misc_feature (1)...(1384): n = A,T,C or G
tttttaaattctaaaggtttaattagtaaattcattatttcctcccaaaatatactgtcattcttctcttaacaatgaatgtttgacacaaatccaattttgatgttaaaagtcaacatacatagataggtccctcatgttgacagagcacagaattggaaaaaaaaactgcaaatgagaaataggggtatttctaaatcttctgtattcctaaaatatcacactgcgcccttgcttcagcctccctgatagactggtttgggtgtgcaatattaatgcaggaatacgtggaataccagcacaaagccggggagggagactagcaaactctcgccatcaattatttctcaactacatttagtattcttcgcagttttagatttttttttcctttaagcgaaaaccactccactgaaaaaaattccaaacttgttttttaaaaattgcaggaatttcttcgtattttatcaacaaaaataccagaaattaaagagctgacagaaattcaagcagatccaaattcaaccatccatttttcatacttctccaagtctgcagcagagacagacttagcaattttctttagggccaattcaaagtctcctttggtaacaggcatctgaagttcctctttagaaagtgcacggatttcttctggacttaagccattgatacgccgtctcattgccattaaagaggcatccctgcaaacattagtgatgtcagcaccagaatagccctcaatcttctcggctatatcttccagttgaatatcaggatctaattcgacctcacgaaggttgatcttcagaagctcagctcttccttttgctgttgggagaggtatatatatccttttttctaaccttcttcgcaaagcttcatcaatgtcccacgggaaattagtagcagccaataccataaccattttggaaggatcatcattttctaaagctcctccaactccatccatctgaatgagcagttcagacttgaccctgcgacttgcctcatgttcatcaaggttcctcttcgactgcagatagaatctatctcatcaaatgaagatcgtggtaggggcataaaacctagccatctcaaacaacagacgaactaacttctcagattcacctctgtatttagaattcagtgaagaagacgaaacgttgaagaatgttgtaccacattcagtggcaacagctttagctagcatagttttaccagtgcctgggggtccaaccatcagtacacccttccatggccttctaatccctttgaaaaagtcaggcatccacattggaagaacaacagcttcccttagcaacttcttagcttcttccagatctgctatgtcatcccaatgaatcggacgcgtgggtcgngt

SEQ ID NO: 941 - DNA, 1014 bp, Homo sapiens
gcagatattaaatcaatatgtgctgaagctgctttatgtgctttacgacgacgctacccacagatctataccactagtgagaaactgcagttggatctctcttcaattaatatctcagctaaggatttcgaggtagctatgcaaaagatgataccagcctcccaaagagctgtgacatcacctgggcaggcactgtccaccgttgtgaaaccactcctgcaaaacactgttgacaagattttagaagccctgcagagagtatttccacatgcagaattcagaacaaataaaacattagactcagatatttcttgtcctctgctagaaagtgacttggcttacagtgatgatgatgttccatcagtttatgaaaatggactttctcagaaatcttctcataaggcaaaagacaattttaattttcttcatttgaatagaaatgcttgttaccaacctatgtcttttcgaccaagaatattgatagtaggagaaccaggatttgggcaaggttctcacttggcaccagctgtcattcatgctttggaaaagtttactgtatatacattagacattcctgttctttttggagttagtactacatcccctgaagaaacatgtgcccaggtgattcgtgaagctaagagaacagcaccaagtatagtgtatgttcctcatatccacgtgtggtgggaaatagttggaccgacacttaaagccacatttaccacattattacagaatattccttcatttgctccagttttactacttgcaacttctgacaaaccccattccgctttgccagaagaggtgcaagaattgtttatccgtgattatggagagatttttaatgtccagttaccggataaagaagaacggacaaaattttttgaagatttaattctaaaacaagctgctaagcctcctatatcaaaaaagaaagcagttttgcaggctttggaggtactcccagtagcaccaccacctgagccaagatcactgacagcagaagaa

SEQ ID NO: 942 - DNA, 534 bp, Homo sapiens
cctgagccctaaggagtttatcatctgcaacgcaaagtcgatccaaatcagaacacccacggaggaatgagttgagtgagggatgatttgaccaaaaaacgcattgccaagtgtaaagcggcaccaagaacaggcgccaggctccatctgctggtgagagggatttttacacaaattcctggaacaccttcatggtgatccaacccatacctgactggtgattttcaagtgcatcaaagatcttcctcacgggccgcatggctgcttccctgcagacgagcttaatatctgagcctgagtagccctcagtctcctgaaacagccaaaaaaccagccattggtcagtgggcagaatgctcctggccattaccgttgttataggcaggacccagtatcagaagccctgtgtagattctgtatctgtcacccatgaacatcctaaaaagattcccagataaacagtgcttgaggaagagaccctgctagcatgttgggataacctaagcagctgggctagaatggctttctaacacc

SEQ ID NO: 943 - DNA, 562 bp, Homo sapiens
  misc_feature (1)...(562): n = A,T,C or G
ttccgccccgcgtccgcaaaaagaaagagaagaaggcaaagaaggataaagatctgacagctgacaggaccatcgagtctctgtataaggaactggtggaagaaggattactgatccaggctctgaaagtcaacctctctgattacattggtgagtacagctacctggggactactcttcgccaggtgtccatagaacccatgccctccctcctggatgtcagacagctcatcacattgtacggaatctggccattaggttctgcagcagtgcatgagaaagctcctttggtgaaatcgctactgttagccgggccgtctggggtagggaagaaaatgctggtccatgccatctgcaccgaaacgggagccaacctcttcaacttgtcctcctctaacattgctgggaaataccctggcaaaaatggcctccaaatgatgctgcatgcagtcttcaaggtggcttcgacagctccagccctccgtggtgtggattgaagacacagaanaaaccttctacaanaaagtttccaacgcagaaaaagatgaatgaacccactacc

SEQ ID NO: 944 - DNA, 596 bp, Homo sapiens
  misc_feature (1)...(596): n = A,T,C or G
tcgccggctgttccaagaagattcgatagaaaagtacatactgatttgccaaatgaacaagcaaatttaggcatattgaaagtccatgtggatcccatttcaaaccatggtgaaatcgattgtaaagcaattttgtgatgttttcagatggctttaatgaagcagaccctgagaaatgtttgtactgaagcagatatgtttgcaatttgtgctgatcataattttgtagtaaaggaagaccatgaaagcaatcagaaaagtggctgatagtaaggagctagattctaaattgtactataaacctgtgcaatatattgtaaaatttttgataactacatgacagacaatgatctcattaaagtgtatgaatgaaagtatgtatgagtgacaccataacaattagcaattcagtaattcaaattttaagggtggtacagaagaaatttgtgtgtttgcttaatgttgcatttattgcagcagaagttataanaagtgtgttgaagcttttcacatttgctatggagcattttgcaaaatattgaaatggngtgagtataagaaagtatttcttatgacttattttatatcattttttc

SEQ ID NO: 945 - DNA, 525 bp, Homo sapiens
  misc_feature (1)...(525): n = A,T,C or G
ncgcgtccggaagcagagaaaattatccatgcctcttttcttgtggccaggtgtcgccagccctcggtgatttttgttagtgacattgacatgcttctctcctctcaagtgaatgaggaacatagtccagtcagtcggatgagaaccgaatttctgatgcaactggacactgtactaacttcggctgaggaccaaatcgtagtaatttgtgccaccagtaaaccagaagaaatagatgaatcccttcggaggtacttcatgaaacgacttttaatcccacttcctgacagcacagcgaggcaccagataatagtacaactgctctcacagcacaattactgtctcaatgacaaggagtttgcactgctcgtccagcgcacagaaggcttttctggactagatgtggctcatttgtgtcaggaaagcaagtggtgggccccctccatgccatgccagccacagacctttcagccatttatgcccagccagttgaggcccgttacataataaagactttgaaaatgc

SEQ ID NO: 946 - DNA, 1039 bp, Homo sapiens
  misc_feature (1)...(1039): n = A,T,C or G
tgcaaaaaatgaccccagcctggaccaagggaacttctcaagctttggtacccagcaggacacagcagcaatcacgtgcatgctggtaccgcgacggacaggctgccgcaccccaggcccccagaggccagtctgtttgcctcccaacgccatctgacccaggtgagcaagaggatgctggcggggggcgtgaggagcatgcccagccccctcctggcctgctggcagcccatcctcctgctggtgntgggctcagtgctgtcaggctcggccacgggctgcccgccccgctgcgagtgctccgcccaggaccgcgctgtgctgtgccaccgcaagcgctttgtggcagtccccgagggcatccccaccgagacgcgcctgctggacntaggcaagaaccgcatcaaaacgctcaaccaggacgagttcgccagcttcccgcacctggaggagctggagctcaacgagaacatcgtgagcgccgtggagcccggcgccttcaacaacctcttcaacctccggacgctgggtctccgcagcaaccgcctgaagctcatcccgctaggcgtcttcactggcctcagcaacctgaccaagctggacatcagcgagaacaagattgttatcctgctggactacatgtttcaggacctgtacaacctcaagtcactggaggttggcgacaatgacctcgtctacatctctcaccgcgccttcagcggcctcaacagcctggagcagctgacgctggagaaatgcaacctgacctccatccccaccgaggcgctgtcccacctgcacggcctcatcgtcctgaggctccggcacctcaacatcaatgccatccgggactactccttcaagaggctgtaccgactcaaggtcttggagatctcccactggccctacttggacaccatgacacccaactgcctctaagggcctcaacctggacgtccctgttccattcacacactggcaatctggaccgttgttgcccttacctgggccgttncgtcacctagtnttatnttccgtt

SEQ ID NO: 947 - DNA, 1321 bp, Homo sapiens
  misc_feature (1)...(1321): n = A,T,C or G
ttttttttttttagtttttttctctttttattatttcaagttttcataaaaatccataattattgaaacccaagttacagagaaagttcgtaacttttttattgaattattgactctgccgcgtgtcggttcgtcggctttcaactccagtctgtcaatgcccctgtgtaggtggggtccccaggtctgggcttctgaggtcctggtagaaggagggcaggtggtgagggctggcggggggcagcaggggacggaggcgggagggagaaagagaacgtgtgtagaagggtagggaggaggtgggaaggactggagagtgagcaggtggcggccaggccccttcccctgcccggccgcccgggggtccctgccccccgccccggcctcatatcatcttcatgttgaacttgcggggcgcgtcggcggagctgatgcctgcgtccgactttcggggcacatactcgatctcgatgttgtgctttgtgttgcccttgccccggctccagagaaacagcagcaccaggcagaagaggacgacgcccaggaaagagatgaagcccatggtggtggcgatgatgagggtcttgatgtcgaaggggaaaggcacagtggcgcgggtgctgttggcctctccctcgcccggctggttggagatgaaagcgaaggtcttgttgggctgatggggccagtcgggcgagtagctgcgcacatgcaggtgggcgggcatggagtcgttgccgcccgcgttggccgcgatgcacaggtacgtgccgttgtcctgtacctgggcgtagcgcacctccagcgtgccatcagggaagactgtganccgcccattgctcttggctgagaccaagtgctttcggggtgagagccagaagatggcgggcggcgggtcccatcggcccggcacacaaactgcaccgtgtggcccttcgtccacaaacacctgctgggccttgcggtcccggatccggcgcggcggcangtgaagtagttgggcagtacacatcagggaagtccttgaactccttgccctggacaaactccggcctggcccagttgggctgctgccggttgaattnaaccgccagcggcgccggaaaacccacaggaaccgacagtcgcaggccancnggttggaatcaagaataatntctccaagtttcccacccaattgaaaactgattcctccagtgtggtcagctggttgccagagannattgagctcgncgtcngtagttgaggccgcggaaggcatagggctccaccacggccagctgcccngcccaccagctggnttctcctgcagccggagcag

SEQ ID NO: 948 - DNA, 304 bp, Homo sapiens
cgtccgcccagaagaacaagttgccatggtgcttgatcggacctctgtgggcgttggcctgaaaggatgcattcgtatgctggatatcaacaatcagcagctggagcttagcgactggcagagggctgcggttcaaagctctggtgtgggagaatgtggagaccatccgtgcttacctaacccctgccatggtggggccctatgccaggcactggaggctggcatgttcctctgtcagtgcccgcctggccgctttggcccaacttgtgcagatgaaaaaaagcccctgccagcccaacccctg

SEQ ID NO: 949 - DNA, 304 bp, Homo sapiens; identical to SEQ ID NO: 948

SEQ ID NO: 950 - DNA, 304 bp, Homo sapiens; identical to SEQ ID NO: 948

SEQ ID NO: 951 - DNA, 510 bp, Homo sapiens
  misc_feature (1)...(510): n = A,T,C or G
ggagaggangaggtttctgcccttttcaatttcgaacttggaataaggcagggcttctgctgttcagtgaacttcagctgtccttaagtcgaatctctaccagccaggaaaattacccagtgacatcacagcaggtgtcgaattaaatgatgggcagtggcattctgtctctttatctgctaaaaagaatcacttgagtgtggcggtggacggccagatggcttctgctgctcctctgctggggcctgagcagatttattcgggtggcacctattattttggaggttgtcctgacaaaagctttggatccaaatgtaaaagtccacttggtggatttcagggatgtatgaggctcatttctatcagcggcaaagtggtagatctgatttcagttcagcaggggtcccttgggaacttcagtgaccttcagatagactcatgtggcatctnagcaggtgtttgcccaactattgtgacaccgtggggagtgttcccagtcttggagcacct

SEQ ID NO: 952 - DNA, 561 bp, Homo sapiens
  misc_feature (1)...(561): n = A,T,C or G
cgcgtccggacggccgacctgccagatatcgatgaatgcacagactcagacacctgtggggacgcgcgatgcaagaacttgccaggctcctactcttgcctctgcgatgagggatatacatacagctccaaggagaagacctgccaagatgtggacgagtgccagcaggatcgctgtgagcagacctgtgtcaactccccaggcagctatacctgccactgtgatgggcgagggggcctaaaactatccccagacatggatacttgtgaggacatcttaccatgtgtgcccttcagcatggccaagagcgtgaagtccttgtacctgggccgcatgttcagcgggacccccgtgattagactacgcttcaagaggcttcagcctaccaggctgctggctgaatttgacttccgcacttttgaccctgaaggagtnctcttcttcgctggaggccgttcagacagcacctggattgtcctgggcctaagagctgggcggnttgagctgcagctttnggtacaatggcgttgggcgcatcaccagcagtggngccaaccatta

SEQ ID NO: 953 - DNA, 561 bp, Homo sapiens; identical to SEQ ID NO: 952
  misc_feature (1)...(561): n = A,T,C or G

SEQ ID NO: 954 - DNA, 339 bp, Homo sapiens
  misc_feature (1)...(339): n = A,T,C or G
ggtggtcacgcgcggaacaaacatgcagcggctcgggggtattttgctgtgtacactgctggcggcggcggtccccactgctcctcgctccttccccgacggtcaacttggactccggcggagccgggcccagctctcaactaccctcaggaggaagctacgctcaatgagatgttccccgaagttgaagaactgatggaagacactcagcacaaactgcgcagtgccgtggaggagaatngaaggcgnaagaaactgctgctnaaacatcatcagaagtnaacctggcaaacttacctcccaactatcacaatganaaccancncagaccccaaaggt

SEQ ID NO: 955 - DNA, 978 bp, Homo sapiens
  misc_feature (1)...(978): n = A,T,C or G
tttaactttaacttttttattttagttgcagctaaagcatttattggtataacaaacacaaggactgccacccctgctaacactgctggacccagctcttgccaaaggagatatacggccattaggatttgaaaaggggcagaccagaggagattgaggtttgctgtcaagtccatgagttgctgacatcaagttaataatttccccagtggaaaacttttgtcgagaaacatttgataaaagtaaggcctttttgtagatcagtccatttacagctgtcttaacttttgctgaggtgagcatgttaaaaaattgaaattgctgaagacactgacttttcaataagagtacatctacaagtttccacatgacaggccatacaaataactgacaaaacttgaattattcactaagaaaatgctaattaaggacaaaatatcagcaaacactttgaataaggcaacttgaatcaggatggatttaaaggtgttccacaatgcatagagtagagatggtttcttgatatgtgcctctttataacaagatacctttactttttgcctctcttgattccttaaaacttcctttctccattgtttttcaaagatgggacacgcagtgcagaaggaatcactttcctttagttcaaaaagatcctctctttccaaaggtctccttatagcctaaaagtaattactctgctaaaccaggaatatgtcactttactgaaaaatgaggcacttttctctggactgcatttctgtgtatcaagcgccccgcggacccgctgataggagccgcccccccgttctgcgtactggagagcatggtcccggggcgcccggccgctggctgagagcccggctgcggctgtcacttcccttggcaccggacagtcagttcagcgccagcacggtgggaggacacgcactccgccccggcagagccagctgtcacnttagtccctgcctttcancc

SEQ ID NO: 956 - DNA, 530 bp, Homo sapiens
  misc_feature (1)...(530): n = A,T,C or G
ggcccccagcagagggcatatgtgtttccttttcaacctgccngcnctcctgttgtngctactanttttatggctggncgatcacaccgctcatgtacccagcctccttcttcttctccgtgcccagcacagctatgtggtgctcacctgcataacctctttattggcatcaatggaagcatggccacctttgtgcttgagctcttctctgatcagaagctgcaggaggagacaggcagttccagtcacccctgcgctgggaggtggtcggcaagaacctcttggccatggtgatacaggggcccctcttccttctcttcacactactgctgcagcaccgaagccaactcctgccacaagcccagggtgaggtctctgccactcctgggagaggaggacgaggatgtagcccgtgaacgggagcgggtgggtccaaggagccacccagggggatgtgttggtgctgaggaacttgaccaaggtataccgggggcagaggatgccagctggtgacccgcttgngcctgggg

SEQ ID NO: 957 - DNA, 189 bp, Homo sapiens
  misc_feature (1)...(189): n = A,T,C or G
cgcagcanagggcatatgtggcccctgccaacctgcctgctctnctgctgttgctactactgnatggcacagcctatgtggtgctcacctgcataaacctctttattggcatcaatggaagcatggccacctttgtgcttgagctcttctctgatcagaagctgcangaggtgagccggatcttgaaac

SEQ ID NO: 958 - DNA, 3609 bp, Homo sapiens
atggccaggccattggctctgcccctcactgggatgtctgcgcccggctcctccctgaccaccattccccacgtgagactcatgaacaagctacagccgggctccgtccccaagatcaaccgctccatgcagaactggcaccagctagaaaacctgtccaacttcatcaaggccatggtcagctacggcatgaaccctgtggacctgttcgaggccaacgacctgtttgagagtgggaacatgacgcaggtgcaggtgtctcttctcgccctggcggggaaggtcaccaatgcctcttccccagggagactggggtggggcgtgagccggggctccctgaagcacccctttgtccacacaggcactcctcagctgctggccctggtacagcactgggtgcccggggcacggctggtggaggagctgccacacgagctggtgctggtgctgccctacacgggtgcccatgacggcagcttcgccacactcttccgagagctagacacgcggctggcggagctgaggctcactggctacgggatctccgacaccagcctcgaggagatcttcctgaaggtggtggaggagtgtgctgcggacacagatatggaggatggcagctgcgggcagcacctatgcacaggcattgctggcctagacgtaaccctacggctcaagatgccgccacaggagacagcgctggagaacggggaaccagctgggtcagccccagagactgaccagggctctgggccagacgccgtgggccgggtacagggctgggcactgacccgccagcagctccaggccctgcttctcaagcgctttctgcttgcccgccgcagccgccgcggcctgttcgcccagatcgtgctgcctgccctctttgtgggcctggccctcgtgttcagcctcatcgtgcctcctttcgggcactacccggctctgcggctcagtcccaccatgtacggtgctcaggtgtccttcttcagtgaggacgccccaggggaccctggacgtgcccggctgctcgaggcgctgctgcaggaggcaggactggaggagcccccagtgcagcatagctcccacagcgcccttgagtgtgcacagcccattgtctgcaggttctcggcaccagaagttcctgctgaagtggccaaggtcttggccagtggcaactggaccccagagtctccatccccagcctgccagtgtagccggcccggtgcccggcgcctgctgcccgactgcccggctgcagctggtggtccccctccgccccaggcagtgaccggctctggggaagtggttcagaacctgacaggccggaacctgtctgacttcctggtcaagacctacccgcgcctggtgcgccagggcctgaagactaagaagtgggtgaatgaggtcagatacggaggcttctcgctggggggccgagacccaggcctgccctcgggccaagagttgggccgctcagtggaggagttgtgggcgctgctgagtcccctgcctggcggggccctcgaccgtgtcctgaaaaacctcacagcctgggctcacagcctggatgctcaggacagtctcaagatctggttcaacaacaaaggctggcactccatggtggcctttgtcaaccgagccagcaacgcaatcctccgtgctcacctgcccccaggcccggcccgccacgcccacagcatcaccacactcaaccaccccttgaacctcaccaaggagcagctgtctgagggtgcactgatggcctcctcggtggacgtcctcgtctccatctgtgtggtctttgccatgtcctttgtcccggccagcttcactcttgtcctcattgaggagcgagtcacccgagccaagcacctgcagctcatggggggcctgtcccccaccctctactggcttggcaactttctctgggacatgtgtaactacttggtgccagcatgcatcgtggtgctcatctttctggccttccagcagagggcatatgtggcccctgccaacctgcctgctctcctgctgttgctactactgtatggctggtcgatcacaccgctcatgtacccagcctccttcttcttctccgtgcccagcacagcctatgtggtgctcacctgcataaacctctttattggcatcaatggaagcatggccacctttgtgcttgagctcttctctgatcagaagctgcaggaggtgagccggatcttgaaacaggtcttccttatcttcccccacttctgcttgggccgggggctcattgacatggtgcggaaccaggccatggctgatgcctttgagcgcttgggtgagaacttcctgtcaggagacaggcagttccagtcacccctgcgctgggaggtggtcggcaagaacctcttggccatggtgatacaggggcccctcttccttctcttcacactactgctgcagcaccgaagccaactcctgccacagcccagggtgaggtctctgccactcctgggagaggaggacgaggatgtagcccgtgaacgggagcgggtggtccaaggagccacccagggggatgtgttggtgctgaggaacttgaccaaggtataccgtgggcagaggatgccagctgttgaccgcttgtgcctggggattccccctggtgagtgttttgggctgctgggtgtgaatggagcagggaagacgtccacgtttcgcatggtgacgggggacacattggccagcaggggcgaggctgtgctggcaggccacagcgtggcccgggaacccagtgctgcgcacctcagcatgggatactgccctcaatccgatgccatctttgagctgctgacgggccgcgagcacctggagctgcttgcgcgcctgcgcggtgtcccggaggcccaggttgcccagaccgctggctcgggcctggcgcgtctgggactctcatggtacgcagaccggcctgcaggcacctacagcggagggaacaaacgcaagctggcgacggccctggcgctggttggggacccagccgtggtgtttctggacgagccgaccacaggcatggaccccagcgcgcggcgcttcctttggaacagccttttggccgtggtgcgggagggccgttcagtgatgctcacctcccatagcatggaggagtgtgaagcgctctgctcgcgcctggccatcatggtgaatgggcggttccgctgcctgggcagcccgcaacatctcaagggcagattcgcggcgggtcacacactgaccctgcgggtgcccgccgcaaggtcccagccggcagcggccttcgtggcggccgagttccctggggcggagctgcgcgaggcacatggaggccgcctgcgcttccagctgccgccgggagggcgctgcgccctggcgcgcgtctttggagagctggcggtgcacggcgcagagcacggcgtggaggacttttccgtattcttgtacttctccaaggaccaggggaaggacgaggacaccgaagagcagaaggaggcaggagtgggagtggaccccgcgccaggcctgcagcaccccaaacgcgtcagccagttcctcgatgaccctagcactgccgagactgtgctctga

SEQ ID NO: 959 - DNA, 419 bp, Homo sapiens
cgcggtggttcagaacctgacaggccggaacctgtctgacttcctggtcaagacctacccgcgcctggtgcgccagggcctgaagactaagaagtgggtgaatgaggtcaggtacggaggcttctcgctggggggccgagacccaggcctgccctcgggccaagagttgggccgctcagtggaggagttgtgggcgctgctgagtcccctgcctggcggggccctcgaccgtgtcctgaaaaacctcacagcctgggctcacagcctggatgctcaggacagtctcaagatctggttcaacaacaaaggctggcactccatggtggcctttgtcaaccgagccagcaacgcaatcctccgtgctcacctgcccccaggcccggcccgccacgcccacagcatcaccacactcaaccacc

SEQ ID NO: 960 - DNA, 244 bp, Homo sapiens
  misc_feature (1)...(244): n = A,T,C or G
gtggttcgcggtccgaggtacccaagtgagtcacgtccgtagaccaccgtgtccaccataagcatggtgacagcaaggagcagattgaagtcatctccttccaatcctggggactggcctgaacnagtgccactggatgcccactcctgccacttcatacagtgtcaaagtaccctgcccgggcggccgctcgaaagccgaantntncngcancanctggcggccgttanctangtggantncc

SEQ ID NO: 961 - DNA, 523 bp, Homo sapiens
caaagcacatttctgtttttttttttttctttctctctttctctttctctctctttctttcttttttagaggtgggtctctctatgtttcccaggctggtctcaaactcctggccacaagcagtcctcctgcctcggcctcccaaagtactggaattacaggcatgggctgccttagaactctactaatatgagtcaggataagatgagcttttaaggccaccttggcacaccactgaattggatcacacacggcatcacctcagacctccatatcctctccttgggagtcactgcagagttctatctcagcagcattaatgtggaaggcagtaaggggtcagtaagaataggccctgagggactgggggcctcacccatacagtagtagcaacagcaggagagcaggcaggttggcaggggcacatatgccctctgctggaaggccagaaagatgagcaccacgatgcatgctggcaccaagtagttacactgcattggagatggcagttacctttatcagc

SEQ ID NO: 962 - DNA, 2075 bp, Homo sapiens
  misc_feature (1)...(2075): n = A,T,C or G
gagcagctgtctgaggctgcactgatggcctcctcggtggacgtcctcgtctccatctgtgtggtctttgccatgtcctttgtcccggccagcttcactcttgtcctcattgaggagcgagtcacccgagccaagcacctgcagctcatggggggcctgtcccccaccctctactggcttggcaactttctctgggacatgtgtaactacttggtgccagcatgcatcgtggtgctcatctttctggccttccagcagagggcatatgtggcccctgccaacctgcctgctctcctgctgttgctactactgtatggctggtcgatcacaccgctcatgtacccagcctccttcttcttctccgtgcccagcacagcctatgtggtgctcacctgcataaacctctttattggcatcaatggaagcatggccacctttgtgcttgagctcttctctgatcagaagctgcaggaggtgagccggatcttgaaacaggtcttccttatcttcccccacttctgcttgggccgggggctcattgacatggtgcggaaccaggccatggctgatgcctttgagcgcttgggagacaggcagttccagtcacccctgcgctgggaggtggtcggcaagaacctcttggccatggtgatacaggggcccctcttccttctcttcacactactgctgcagcaccgaagccaactcctgccacagcccagggtgaggtctctgccactcctgggagaggaggacgaggatgtagcccgtgaacgggagcgggtggtccaaggagccacccagggggatgtgttggtgctgaggaacttgaccaaggtataccgtgggcagaggatgccagctgttgaccgcttgtgcctggggattccccctggtgagtgttttgcgctggtgggggccaatggagcagggaatacgtcgacgctccgcatggtgacggggcacacattctccaccagagaccaacctgtgctcccacaccacttattgggcacctactccagtgcaacactcctgctcctattattattctcttaaaccattaccatctttaaactgatgacgggccgcgagcacctggagctgcttgcgcgcctgcccggtgtcccggaggcccaggttgcccagaccgctggctcgggcctggcgcgtctgggactctcatggtacgcagaccggcctgcaggcacctacagcggagggaacaaacgcaagctggcgacggccctggcgctggttgggtaccaagccgtggtgtttctggacgagccgaccacaggcatggaccccancgcgcggcgcttcctttggaacagccttttggccgtggtgcggaagggccgttcagtgatgctcacctcccatagcatggagagagtgtgaagcgctctgctcgcgcctagccatcatggtgaatgggcggttccgctgcatgggcagccagcacatcctcaagggcagattcgcggcgggtcacacactgaccctgcggtgcccaccgcaaggtcccagccggcagcggccttcgtggcggccgagttccctgggtcggagctgcgcgaggcacatggaggccgcctgcgcttccagctgccgccgggagggcgctgcgccctggcgcgcgtctttggagagctggcggtgcacggcgcagagcacggcgtggaggacttttccgtgagccagacgatgctggaggaggtattcttgtacttctccaaggaccaggggaaggacgaggacaccgaagagcagaaggaggcaggagtgggagtggaccccgcgccaggcctgcagcaccccaaacgcgtcagccagttcctcgatgaccctagcactgccgagactgtgctctgagcctccctcccctgcggggccgcggggaggccctgggaatggcaagggcaaggtagagtgcctaggagccctggactcaggctggcagaggggctggtgccctggagaaaataaagagaaggctggagagaagccgtgctggtgaaaaaaaaaaaaaaaaaaaaaaaaaaaanaaaaangggnggccgctagactnn

SEQ ID NO: 963 - DNA, 66 bp, Homo sapiens
  misc_feature (1)...(66): n = A,T,C or G
ttttttctctagnactagtctagccggccgcccnnnnnnnnnnnnnnnnnnnnnnnnnnnnnnnnn

SEQ ID NO: 964 - DNA, 28 bp, Homo sapiens
gaacccagtgctgcgcacctaagcatgg

SEQ ID NO: 965 - DNA, 499 bp, Homo sapiens
  misc_feature (1)...(499): n = A,T,C or G
ttcgcttagctgcaaggagagatccgcgtggattatcanggagatattttgataaatggcaaacctcgacctgctaatttcaagtgtacttctggttatgtaccacaaaatgatgtggtgttgggcacagtgaccgtgagagacaatttagagttctcagcagctcttcgtctcccagtgactataacaagagatgaaaagagaaggaggattaatgaggtgcttgaacttctgcatctgaataaagaacaaaatatcaagcctagatccaaagaactcaggaaaaggaccagtatagcaatggagctggtcactgagcatcccattttgttcttggatgatcccacaactggcttagatttgagaactacgactgatgtcattttagtcctgagaaggatgtcgaagaagggacggaccatcatcttctccatcaatcagcctcagtactccatcttcaaattttttgatagcctcaccttagtggcttcaggaaaag

SEQ ID NO: 966 - DNA, 451 bp, Homo sapiens
  misc_feature (1)...(451): n = A,T,C or G
ggatgccgaaaatgagcacctggtccaggaggcccttgaccggctgatggaagggagaaccgtgctgatcatagcccaccgcctgtccaccattaagaatgccaactttgttgctgtccttgaccacggaaagatctgtgaacacgggacacatgaagagctgctcctgaagcccaatgggctttacagaaaactgatgaacaagcagagtttcctgtcatataatggagcagagcagttcctggaacctgcacgggcgtagcctgcagtgcaggtattgggtaactgaagcagggctgtgactctatcatataccctgtccacagacaggaaacagagcagcagctacccgtgggctgagagaccttaaaaccaaacagcatttgcanagaacaggggcctggaggcccgtgtgaagcctgggagcatctttcaagtttatttgaaatat

SEQ ID NO: 967 - DNA, 755 bp, Homo sapiens
  misc_feature (1)...(755): n = A,T,C or G
tcgccacgcgtccgagcttatttggcaacgaaccccaccggactcaccaccgcagccccggtccggcaccgacctgaatatccagagccccaggggctggcagctgcggttggatttctcacgatgtccagtgttatctccatgtctgcccctttcttcctggggaagatcattgatgtcatctataccaaccccactgtggactacagcgacaacctgacccgcctctgcctagggctcagtgccgtgtttctgtgtggtgctgccgccaatgccattcgtgtctacctcatgcaaacttcaggtcagcgcattgtgaataggctgagaacttcattattctcctcaattctgaggcaggaggttgcttcctttgacaagctccgcacaggaaaattgaataaccgtctctcctcacacactgcacaccaggtgcgcatagtgactaaaaacctcccagatgttctcagggccagggtccatgccttcgtacgcacccaaatgattctttttttgtcacataatatctccacctttgtttttagcggtgttaccccaggtttaaaaattagcccaaattaagggagaaaacacacccaaaccgataatggggttttttggtgacttcaccatcttggtcattttgatgggacgtgttgctgngggttgttcagtgcctgcaggtggttcagacctgaatatacaactcctgaggtggactggagcgtggagcagaatgggcctctgccaaaccc

SEQ ID NO: 968 - DNA, 754 bp, Homo sapiens
cgtccggaccctgctatacgtccggcctggatcaacgcatgtggctcagatcttggacgacgccaacgggacttcctcaacgcattgcagtcacccattgagtaccagagacgggagagccagaccaacagcctggggcggccaagagggcctggagtggggagccctggaagaattcggcttggagatcaggcccagggcagcacacacacacccatcaatggctctctcccctctctgctgctgtcacccaaaggggaggtggccagagccctcttgccactggataaacaggcccttggtgacatcccccaggctccccatgacttctcctccagtctctccaactccaaaaacccctccctgccaagccagacttgccaagctggatgaagatgagctgtaactggtgaaaaccatgggggtggtgctgactcagccgcctattccccaaggagcttcagggcagtccttctggcactgctccagaattcctccttcttggtgtgtctggagggtgggcaaggctgggagggatatcaacttggaggagaacacctagacccaaggacttttttctgcccaaggaacacagtttccttcagctcccatccctatgcatgcatcatggtccccccaaaaggaggatatgtgggtgggtgggagggctggggcaggggccagatagaaattattggttttgttttttaattttgtttttcctgttttctgagaataaaggttttgttatatc

SEQ ID NO: 969 - DNA, 1180 bp, Homo sapiens
  misc_feature (1)...(1180): n = A,T,C or G
ccgcgtccgtgtgcctgcccccctcttacccgaaaagtgctggcaaaatgcggctgctgcttcgcccgggggggacgtgaatcctattccattgcgggcagtgaggggagtatatcggcttctgctgcctccggtctggctgccccctctggccccagctctggcctcagctctggcccctgttccccaggccccccagggcccgtcagtggcctgaggagatggttggatcattccaaacattgtctcantgtggaaactgaggcagacagtggtcaggcaggaccatatgagaactggatgttggagccagctctagccacaggagaggagctgccggaactgaccttgctgaccacactgttggagggccctggagataagacgcagccacctgaagaggagactttgtcccaagcccctgagagtgaggaggaacagaagaagaaggctctggaaaggagtatgtatgtcctgagtgaactggtagaaacagagaaaatgtacgtggacgacttggggcagattgtggagggttaaatggccaccatggctgctcagggggtccccgagagtcttcgaggccgtgacaggattgtgtttgggaatatccagcaaatctatgagtggcaccgagactatttcttgcaagagctacaacggtgtctgaaataccatgattcacaaccaccccgactcagcaaacaggagctccggcagcagctggggcaccgcctgcagctgaacgacctcctcatcaaacctgtgcagcggatcatgaaataccagctgctgctcaaggattttctcaagtattacaatagagctgggatggatactgcagacctagagcaagctgtggaggtcatgtgctttgtgcccaagcgctgcaacgatatgatgacgctggggagattgcggggatttgagggcaaactgactgctcaggggaagctcttgggccaggacactttctgggtcaccgagcctgaggctggagggctgctatcttcccgaggtcgagagaggcgcgtcttcctctttgagcaaatcatcatcttcagtgaagccctgggaggaggagtgaagaggtggaacacagcctggatatgtatacaagaacaagcattaagcatagctgcctgggactggaggggaacctccaaggtgacccttgccg

SEQ ID NO: 970 - DNA, 2107 bp, Homo sapiens
  misc_feature (1)...(2107): n = A,T,C or G
tttttttttttttttttttccatccataaacatatgtctttattctctttctgtacatatgggcaatgataaagcttaaagatgcatgtcctaagaaatatgcaaaaacaatgaatttacataaataatttatacttcagaaaattaaagttgaaaaatattttccacattattagagttcacagtatttaaatcaagctttcccacttatactccagactatattgtcttagcagagagtgataaaatctaatcaggaataaaatgatcaagtttctgtttttattcagtgcacgagtagacgctatttcagtatcaggccgcgccaagtgtcgaggctgcagcctctcatcctgacccttcccctcctgagtggctgtgacccagcagaggtcactggcgtggaatggttacagcgtcaccaaaccactccacggtggacacattcaaccgagcggtaacatctggtggtctgatgcctcatttccaagtaatactttttatagccctgaaaatggaaaccttggcatctaaacaaacagagctgaacatgtgaacactaggacaaggcactgtactatggggtttggtttctttatgggaaaggtgtttgcatagattgctagctatttagtgtgcaggaaaacagagcccccagcgtgcatggctttgtgaggggtgaagctgcatggtgctccctcagccccaagagagcgcagtctctcattctccagcccccagccttgtgggctgtcccgctggtgctgtcctttagaacccctacaggagagttttttgctcaaaaagctgcaggtcaaaacggacccagacctccccggtggggacctcatgcagcagcagtcggcgggtcatagggcctttgctttcctgttctgttcgaatttttgccactggaatttcagtacgacccaggaaatcatctggtgaaaactggtctctgtcaaacagggtgagacacagcacgtcttggtagagatccttaataaagaactggcagttaaaattccacttgggattgagtgtgtcctggatggtcctggtggtgtagctctgggagcccatgctgatttcacagtatgggttgctctttccatttggtttgcaggcttttaattctgtagcttcaatgacatgcaccatcaggcgcccaatgcctgaagtcttttgggagcgggcttggtaagctttctcacgcttcttcttctcggtgtcgatgtactgctcagacgccgccttgatcttctgcacccaggtggacctctcattaatgttgtctgttcggagggtgtagacccgatcaatgtgggaaatgtggaagacaggctcatcgctggaagggtctgtgggcagtttcaccaagacttcattcaggaaaatgggcgttttatacattttcaattgagcattggacttcaaagccgaaaagtttcccacagccagaggaaacagcaaagtgctttgaccatgtaggtaagaagcaggaagtcattgaagaggaatccgtgcagttccatgttgcttcttggtcttgtataatttcccactgtgtaagagcttccggggccccaggcagttggtaaaanagttgaaaataagttgctccgcgaggccttcacactgcacgtgcgcctggatccactccagtcggtccgagttttccttctcccgaactccctcattcacttgagagcacagctcctctgcccgctcgagggccagctttagggaggaatggtctgcatggctctccggggtgttctccagaatacttctgatgagcagtgggtagcgggtgatcctctgcatgggtttcagcaggaagctggagaggggcattcctttacaccgcgggtcagatgccagcttctttaaaaattctttgaaatctgtgtcttcatctgtcttcatgctgtaacagagctgctccataaacctggcagctgcagaacctgatgtaagcctgcatgtgggacagctcagcggccaggatgtccccaatcatctgcaccggcatcttctcgcccccggtcttcttccgcacccgcaaagccttcagcagctttgtgtggaccggacgcgtgggcgc

SEQ ID NO: 971 - DNA, 2107 bp, Homo sapiens; identical to SEQ ID NO: 970
  misc_feature (1)...(2107): n = A,T,C or G

SEQ ID NO: 972 - DNA, 513 bp, Homo sapiens
  misc_feature (1)...(513): n = A,T,C or G
gcgtccgcatccccaggcgccggctctgcggctgctgaatcggaagccgcagggaggatccggggaaataaagacgccggagaatgacctccagcgaggccgcctgagccggggcccgcgcacagccccgccagcccccggcatgggcgaccgcagcgggcagcaggagcgctcggtcccgcactctccaggggcccccgtgggcaccagcgccgccgctgtgaacgggctgctgcacaacggcttccatccgccgccagtccagccgccgcacgtctgcagccggggtccagtggggccggcagcgaccgcggcgccccagcgcctcccgctcctgccggagctccagccgcagccactgctcccttcagcatgactccccggccaaagaaatgcccggctgcggagggaggattggacttcgggggaggaaaggaacaggccgccattcccaatggttttggcatggacgcgcggnncgcaaggcaagacgcagcgtgcggggcccgggga

SEQ ID NO: 973 - DNA, 314 bp, Homo sapiens
  misc_feature (1)...(314): n = A,T,C or G
cgcgtccgcgctgagggctgggggtgcccctgagtccacaaacgcatcccaggtagcctggcactgagggggcatgagtcagacttccgtgactccgaaaacaaccctcctcccagatgcagcagcgttcccacctctgtccagccgcgctactcactgtgacaggaggggatgtcgcagtagcgccagtagatgccctcctctgtctcagccacgtagcaccacggctgcacgtcaccgtctgggttactgcgggtgggganngatngtgaaantatgctataatattttttaaaactnacctgtttggttct

SEQ ID NO: 974 - DNA, 640 bp, Homo sapiens
ctatagggagtcgcccacgcgtccgcggacgcgtgggtcagcatctctccgtgtctcctagagtcaagcagtcaattaccagtttcagttatggaaaaatcaaaatccaaaataagtaacgaatgtgaagtggacactagctcttccatgtggatttatgttttcctgggcaatcttcttcgtggaataggagaaactcccattcagcctttgggcattgcctacctggatgattttgccagtgaagacaatgcagctttctatattgggtgtgtgcagacggttgcaattataggaccaatctttggtttcctgttaggctcattatgtgccaaactatatgttgacattggctttgtaaacctagatcacataaccattaccccaaaagatccccagtgggtaggagcctggtggcttggctatctaatagcaggaatcataagtcttcttgcagctgtgcctttctggtatttaccaaagagtttaccaagatcccaaagtagagaggattctaattcttcctctgagaaatccaagtttattatagatgatcacacagactaccaaacaccccaaggagaaaatgcaaaaataatggaaatggcaagagattttcttccatcactgaagaatcttt

SEQ ID NO: 975 - DNA, 696 bp, Homo sapiens
  misc_feature (1)...(696): n = A,T,C or G
ccacgcgtccgagctacttcggcggccggggtcggcggcccctgtggctggccgtgggtggactcctcatcgccttcggggcagccctcttcgccttacctcacttcatctcgcccccctaccagatccaagagttgaacgcctcggcccccaacgacggcctgtgtcagggtggcaactccaccgccactttggagcctccggcctgtccgaaggactcgggaggaaataatcactgggtctacgtggctttattcatttgcgcgcagattctcattggaatgggctccacacctatttataccctgggaccaacctacttagatgacaatgtcaagaaagaaaactcctcattgtacctagccatcatgtatgtcatgggagcacttggccatgcagtgggatatttattaggtggacttcttattggtttttatgttgatcccagaaatcctgttcaccttgaccagaatgaccctcgtttcattggaaactggtggagtggattcctcctttgtgccattgcaatgtttcttgtgatattcccaatgtttactttcccaaaaaagcttccacctcgacacaagaaaaagaaaaagaaaaaattttctgttgatgctgttagtgatgacgatgttctgaaggagaaatcaaacaacagtgaacaagcggacaaaaaagtttcttngatgggat

SEQ ID NO: 976 - DNA, 680 bp, Homo sapiens
  misc_feature (1)...(680): n = A,T,C or G
ggccgctgtgcaggcgtgggaagggctgccgggccagcactgtggggctggccgcatgtgtgggctgctgtgcgtgtttgcaggtgtgtgtggacgtcttgtgtctgtggctgtgtgatgtgtctttgcggactgggcccatatcacgctcccacctactccacttaattgggctcctgtccccacgccttccctgcgtcccaggccagcctgggggccgtgctccacctcccctcccgaactggactcctgtccccacgccttccctccgtcccaggccagcctgggggccgtgctccacctcccctcccgaactggactcctgtccccacgccttccctccgtcccaggccagcctgggggccgtgctccacctcccctcccgaactgggctcctgtccccacgccttccctccgtcccaggccagcctgggggccgtgctccacctcccctcccgaactggactcctgtccccacgccttccctccgtcccangccagcctgggggccgtgctccacctcccctcccgaantgggctcctgtccccacgccttccctccgtcccaggccagcctgggggctgtgctccacttcccctcccgaactggactcctgtccccacgccttccctgcgtccaaggccacctgngggccgtgctgtgactgcatccctgaagg

SEQ ID NO: 977 - DNA, 1208 bp, Homo sapiens
ttttggtttcctgtcattcatttatttgacaaatgtgctcatcagggcatcccccaccctggtaccccatagtagctgcacacagcaggaaccccagaaaagaccttgccccttctgtccctgcagatgacgtccacggctcccacggccggcaggtctgccgtcggcacgagctctacgtcagcttccaggaccttggctggctggtaattgctgactctccttgtttctgctgtgcccgttccttcctccgtagaagagggtgctggtcctgcccttttgaggcctccatgagggccaaatgtgccatgggacacttagtgccatgcctgcgcagacccctggtgccaccgtggtttgtgaaatcactgccctggcaaatgaactgggggataatgcggtggaagctgcttcccttgaagccgagtcctttaaatgggtgcacatgtagagaaaattctctgtggtcatgggcacgacgtcggaacgcaggagggtttggatgcacccagccggcttgttcccaatcttgatgtccatgtacacctgaggatttgactaggccttttttagcagtgggctctccctaggtgcagaagaaattgctagagagctccctgatgccccaagtaggagtgcgagtattctaaacacccacccaagaacacaactccagtgagtaggctggagcaagtgctgatgaggcaaggccttgggccctgacagggctgcagaaggcaggagccacggccgtagcacccagctggatgcccagtgacgggagacctcagcactgtctaacctgaggcccacacacaggcatgttatctcatcagactcaccctcagaagcatcagtttccttctcctgccccgcagtcccagaacagcgcttttcttgcccatgatccacaactctcaacatcttcaaatgccagctccaatctacccactgtcttccaattaaacgaaaccatccatgtgccaccccctcctccctctagacttggccctgcacatatgctggctggctacatggaagcaaccgggcagccctcttgctcaggcctgagggcaagttttcagaagatagtggaggatgctgggcctttttgctttgtgctccaagacaagactggatagaggataaatataacattcaatacaaaccttcccatttgtgtatagagaaaaccctattttggacgc

SEQ ID NO: 978 - DNA, 1208 bp, Homo sapiens; identical to SEQ ID NO: 977

SEQ ID NO: 979 - DNA, 808 bp, Homo sapiens
gtgtaaataagaaacttttttttttttttttgcttctcttctacaaataaattaagaaacaaactagaaaattacccacacccattgtagcccttgggtgtgggatgtgccctgtccctgcagggccaaaagggtccatgtttccctcaaatctcagagcagtcctggcccaggctgcaggcaggagggaagtcgtgacctcttggcaggctcagtcctgcagctgcttctggctggcgccgtccacacgtggccccccacagccctacccgctgctccgtccacggccagcactggggcggccgggccccggtcccagaagggaagcgggaggacggccacgcacacacgtcccgccgccggtcatgctgctcagcctcgggccgcgcgcttaccaggccactcaaattcaactactagagacatccctccaaccactggcggtcctcgcgctcgcccggaggtgcttgaagggaaccagaccacaaagactgtgcgattagcggcttctggctggcgccgtccacacgtgggcctccacagccctgtcctaccactgccctggccaagcctgctctgtggacgtggcgtcccctctcccgggaagggcccctgacctggcactcgagtgcccagtccgcccaggctgccgccgtggatgcggacctgacctgggaaggtggtgtgggcatgcagtcgctggggaaccaagaccaagcgtttgaatacctgcagcttgaggaatggcaaaggtgggagggaaaccagctcctgcatacggagaggctgagattataccaggtgcacc

SEQ ID NO: 980 - DNA, 735 bp, Homo sapiens
  misc_feature (1)...(735): n = A,T,C or G
cctttttttttttttttgtgtaaataagaaactttttttttttttttgcttctcttctacaaataaattaagaaacaaactagaaaattacccacacccattgtagcccttgggtgtgggatgtgccctgtccctgcagggccaaaagggtccatgtttccctcaaatctcagagcagtcctggcccaggctgcaggcaggagggaagtcgtgacctcttggcaggctcagtcctgcagctgccccaagcagccagactgtccctggggctcgtccaggcccgggcgctggctgggaggggaggtgtctggcaggtcttggcatggaggagaagagctgctgcagggcctctcgggggaggggttggccaagtaggcattcaccagctgcatgatctcttccacctgggggctctgcaggaggagctggctctctcccaccctcaaggccagggtgtgggggcccattagctggcaggcggccacatgccatagctgacactgtggatgggctccgtctcccctggccgggagagggacatggccttggctcccaagcccaggcacagcttctgtggagcaccccgaccaggctccgagcagcgccgaaccccggacactgcgccgccagggccaggtaggcggccatggcctcagctcggcccatgccccgtagccgcttccagccgcccagcacggcagcttgccgtgccggcgccgcctcctccccggangc

SEQ ID NO: 981 - DNA, 261 bp, Homo sapiens
  misc_feature (1)...(261): n = A,T,C or G
tcgaccncccgtccttanccgtgagcgcccagcacgccaagctgtcgctggacgggcagaacatctacaacgcctgctgcacgctgcgcatcgacttttccaagctcaccagcctcaacgtcaagtacaacaatgacaagagccgtgactacacacgcccagacctgccttccggggacagccagccctcgctggaccagaccatggccgcggccttcggcctttccgttccgaacgtccacggcgccctggcccccctgg

SEQ ID NO: 982 - DNA, 808 bp, Homo sapiens; identical to SEQ ID NO: 979

SEQ ID NO: 983 - DNA, 735 bp, Homo sapiens; identical to SEQ ID NO: 980
  misc_feature (1)...(735): n = A,T,C or G

SEQ ID NO: 984 - DNA, 261 bp, Homo sapiens; identical to SEQ ID NO: 981
  misc_feature (1)...(261): n = A,T,C or G

SEQ ID NO: 985 - DNA, 914 bp, Homo sapiens
  misc_feature (1)...(914): n = A,T,C or G
ttttggtttgacacttgttagccagcatttagttcacaagcatagtgaaagtgaccttcccacacctgggagagggatagaggagggagagccagcccagtgtatgccatgggcttatccgtggcagccccagtgtgcaactatcaaaaacagacatcaaaacagcatggtgaatgcctggcactcagcattctcagtttactcttcagtttggtggggtagctcctggactagatactgctgcaaaagaaaacaagcacgaaggaaaccaagatgatttcttcgggctgatacaacctgttctgacctgcaaaaatcctaccttcccccacctccccaccgtaatagtcatagtataagggttgtacagacgcctcaggagacctgcctgattcctttacatccttctccctaacatctagactatctctagagctgtttcctagtcgtgaatgcgtgatggtccttctttgtccctgcaagtatgatccaacatggcccagttcagaatcagaatatgtcttctgtgtcatggtggcatttggtccatggtgggagaaagaaatcaacttttcccagtggtggagtgaggacaggggagggccggccctctcagccttggatgtgatccatttgctgtagtcttccaccttggtgtacagaaacaggccagggcacgtctcaccaccgaagttcaggactcctctcagaacccacagatcgaactgctgtagctggcacatcattgggcttcctgggtccccctgtgataaaagacagaaggcttcaagtcttagaaaaactagtttttgttgtaaatctatccttgtgcaataaactggtttggtctagaaaatgttttacggctgggttctcactgggaaaatggggccaaattattangatacaatttt

SEQ ID NO: 986 - DNA, 532 bp, Homo sapiens
  misc_feature (1)...(532): n = A,T,C or G
gccgtctagctccacctcccagctcccgcctcccacctcccagctaccgcctccctcctcccagttcccagctcccacctcctacctcccagctcccggctcccaccttacagcccctgtctcctccctcctcccagttcccagctcccagctcccgcctncctgcttttaccttcccctgccacctcctgcctccctcctnccagctcccaccttccagctcccgcctccctnctccaagttcccaccttccaaccncgcctccctnctntcagttcccacctcccagctcccacctgccagctgcctnttccctcctccagttcccacctcccagcttnctcctncnnccttntagtnnnnacttctttnctcacaggtcccacctnccagctcccatcttgcagctcccagctcccacctccctccttccagngttccacctnccagctgcnagctnccaccttccagnttccacctgcttgnttgcagggtcccacntgtcaactttccacgttcctgcttccaggtt

SEQ ID NO: 987 - DNA, 1566 bp, Homo sapiens
  misc_feature (1)...(1566): n = A,T,C or G
nnnnttttttttttttttttttaaaattttaaatctttaatttccgttttcacgtattttcttcttgcttccaaaaggaaaggagtgcgtagctctgttgcctgtacatcgtccacagcccctgggtcggggcggggtcccctgggccgcccggggggtccacatgcagcccctgggtgggggccggcgcggggtgaggtccgggggccgccttattgctgaggtccggccggttggggccgccgctaggcgcgctggctgggcagctcctgggagatgaagcgacgcaggcgctccaggtactggctgtagagctcgatgtcgttgtgcccggcgccctccacccacagcggctccaccgccttggggcagcgctcgtagagcgccagcccgtgcgagaagtcgatcacctcgtcctccgtgccgtggatgatgagcacgggagacgtgatcttggacaccttctcgatgttagggaaggcgtcgaagcagtaggtcttcttggtgtcggggaaggcgacgcgcatgcccgaggtgagcggcgagtgcagcaccaccgcggcacactcgtagcgcgaggccaggtccacggtgggcaccgtgccgatgctctgcccgtacaggatgatgctgtccgggctgatgccgtacctggtgcgcagggcctgccaggcggcgtcgatgtcggcatagaggttcctctcggaaggcctgcccgagctggcaccgtagccggagtagtcgtaggagaagatgttgcagtggaggcgggagcccaggccaatgtagaagctgctcatctggcccaggtccacggcattgccgtgcgagaagaggaccgtgtacctggcaccaggcacgcagcgaacatacatgcaggagacgcggttgccgcgggcgctcttggtggggaagacctcgatggtgtccagctcgcgctggctgtactggaagtcggcacgctccgtcaggtgcagcttccagcgcccgggtgcgcccgaggaggctctcagggtccccaagggggcggccccggccccaccaggccccggctcgggctcaggcaccagggagtaggtggcctccggcggcaggaaggcgagcttggcagcgatgcggccggggcagggcgggcagcagaagaggcagcagagctcactcagcgacagcccattcatggcgggcgccgcccaggccgggcctccaccggggcccccgccaacaacgccgcccggcctggcccggcaggggaggggtgggggtgctccgagtcgcgggcaggggggagagcgcccccccagctaccgccccagacagcagccccgttaggaggccagggcccagccccatcgcggtccaagccgagccccagggagcctcgcaaccacaggtctccatgtcgtgccgtgggaagcccaccccggcccgcgcccccgggccccagggccgcgctccatggctcccggccgcccgcccgtgcgtccgtcggtccctccgcaccccttgcccggcctcctgcaccgccaccgccgcagctccccccactaacggaagcgnacggntttc

SEQ ID NO: 988 - DNA, 492 bp, Homo sapiens
  misc_feature (1)...(492): n = A,T,C or G
attagcaaaattactttattctaacaaatagtttaacacaaaaatacgaactagccctccagggatctttggggtctacgcttcccatcgcctcagtgtccggtgcatgaggaaggtgtcctctgaagggcggggccggagttgaagtcggagagggggcagaccgtccagggtcaggtgtggagattcataaaatagcgtttctgggtcacacaagatggtcatgtctggcccaggcccaggtggctccctcggacacgctctcctccaggccgcagcggatctggaacgactttctcagctgttcctccacggccttcgcagcatcaaagtggctcccggctgcggcccgcagctccaggcccaaggccaggctgctcttcagcacgggcatctccagctcctgcggcaccgcaggctgcggctcggaccgcaccggggagggcggcgtcaggcggaagcggacctgngagcagagggcagggcagtgac

SEQ ID NO: 989 - DNA, 1068 bp, Homo sapiens
tttttttttttttttttattagcaaaattactttattctaacaaatagtttaacacaaaaatacgaactagccctccagggatctttggggtctacgcttcccatcgcctcagtgtccggtgcatgaggaaggtgtcctctgaagggcggggccggagttgaagtcggagagggggcagaccgtccagggtcaggtgtggagattcataaaatagcgtttctgggtcacacaagatggtcatgtctggcccaggcccaggtggctcctttgggtgcggggctcgagcctgtggcggcaggagagccaatttctccctgagcgcggcattcagaacctgttcctccggcacctgcaggctcaccaggtcccggaagagccgcttggagcgcggcacgttcagccctgagagcgcagcggcgacggaggtgagtggcgcgcctcaccccgactcccgcacgcggccggccgcccgcccacctcaccatcggacacgctctcctccaggccgcagcggatctggaacgactttctcagctgttcctccacggccttcgcagcatcaaagtggctcccggctgcggcccgcagctccaggcccaaggccaggctgctcttcagcacgggcatctccagctcctgcggcaccgcaggctgcggctcggaccgcaccggggagggcggcgtcaggcggaagcggacctgccgccgctgccgagccgcgccccgccgctccgcccgccccttccgccgcccggggctgccgtgccgcggctgagggctgtcgggccgcgggctcaggctcaagtccaggccgggctcgggcactggggctcggagttgcgggacttggggctccgggggtggccccgggaccgccgcggcttcttccccgtccgccgacttcagctctgactccccacaacccatcatcatctttggaggtgccttgagggtgcggggatgcgggggtcgcagacgctccaacggtcaggggacacagcctggctgccgcctcctttcccccgcccctcctagacgccgctaccggaaaccgtaaccggacgcgt

SEQ ID NO: 990 - DNA, 989 bp, Homo sapiens
  misc_feature (1)...(989): n = A,T,C or G
gatcgacccccgtctgggccaagtagcttagagagcagtagaaacacatccagcaacagctcacctcttaacctaaaaggctcctccgagcagctccatggccggtctgagagcttcagcatgcgaagacctgatccccagcagggacctggccactttgccccgggaagccagcacaccgggacgcaacgccctcggccgccacgagtaccccttgcctcggaacgggcctctcccacaggagggtgcccagaagaggggcacagcccctccctacgtcggagtgcggccctgctcggcctccccaacaagtganatggtcaccttggaggagttcctggagggagagcaaccgcagctcccccacccatgacactcccagttgccgggatgacctgctgagtgactacttccgaaaggccagcgatcccccagccatcggaggccaaccaggaccacctgccaagaaagaaggggccaagatgcccaccaactttgtggcccccaccgtcaaaatggccgcccccacctnggaggggaggccgttgaacccccggcagtacgtaaagccaaacttcagactgactgaggccgaggccccacccagcgtggccccgagacaggcccagcctccccagagcctgtctctgggcagaccccggcaggctccggtgcccccagcttcccatgcacctgccagccgcagtgcctccttgagccgggccttcagcctggcctcagctgaccttctccgggccagcgggccagaggcctgcaaacaggagtcccctcagaagctgggggctcctgaggccttagggggcagagagacaggcagccacaccctgcaaagccccgcaccccccagctcccatagcctggcccgggagcggaccccacttgtgggaaaggctggcagctcctgtcagggcccaggtccccgcagccggccgctggacacgaggcgcttctccctggctcccccaaag

SEQ ID NO: 991 - DNA, 985 bp, Homo sapiens
aagaatctgggatctgcacaggctggcacgagctatggacattcaggggttttgcatgtatgctgaaccctactgccttgctctggtatttggcctcacaaccactgtccaacttcgggtgatgtcacttgggtctcataccttccttgcatgtgtcccaagtttcacaaaacccccttatggaaaagagcacattcgatttcttccttgataaaagggaccagattcacattggccttctgctttacttgcattcctcattgtcttttagactcagcctcagcttgggctttgttagcaagttcactgccaccatagcatcacagcctaaagggcatggctgagactcattgatctatagagcactcttttaccccaacatactctaaattactgatcaaagatcaaaaacatgaagagcatttatactccattcttgttttttgagacctgcttgatttattccgattatttaacacacagggacgcaacagtgatcccaaagtgtgtaaagttaaagccttcaactgcagctgaggagagggcaggaatggggacggtggtgagtcaggaatgacaggcaggcagccatgaccagggcagcctcctccccagggccagggactggggagtggcctaaggagcaggacctaagggtagcccagagctggggaagggggcagagacctccccttggcctaggtctggagctcagaagtgccacatgcctgagggggcagcggcctgggaagggccagaggcagggtcaggagagcaccatttcctggggggctggggacagggaggtgccctataggagaagccaggaggggccgtctgccccttgaggtgggggctgggctggagcaagctgcagcaagaaagacctgaggcaggcacagggcctgagagcccactgctgggttcagggggctcccagggcagcctggcccagggagcagtcctgactctgcaggtttgcccc

SEQ ID NO: 992 - DNA, 993 bp, Homo sapiens
agcccttttttttttttttttttgatttattccaagtatttaatacacaatgacgcaactgtgatcccaagtgtgcaaagttaaagccttcgactgcagctgaggagaagggaggaatggttcacctggggacggtggtgagtcaggaatgacaggcaggcggccatgaccagggcagtctcctacccatggccagggacaggggagcggcctgaggagcaggacccaagggtagcccagggccggggaagggggcagagacctccccttggcctaggtcaggagctcagaagtgccacatggctgaggggcagcggcccgggaagggccagaggcagggccaggagagcaccatttcctgggaggctaggggcagggaggtgccctacaggagaagccaggaggggccgcctgcccctggggtgggggccaggctggagcaggctgcagcaagaaagacctgaggcaggcgcagggcctgagagcctggctggctgggctcggaggggggggctcccagggcagcctggccccgggagcagtcctgactctgcaggggatgccgagtgaggggcagcagtcccctcaggacctcccctcctctctgcctggaaaggagctggagaacccgtagtgcaaatctgtggaccactcagttatggagggaggctgtgcccaaaagtggacactggggtgcatcccctccaccacctcggcctccaccgctgtcctcagtacagccgcttttcgtaagagtgcaggccatggacaccaccctcaatctgggccgacatggtccgcttctcaaacttgagctctcctgagtacatcatggaccgaaggacagacaggctgcgggccccgatatcctggcagccgtgttggatgcctgctatgaggtagggcacgaacttctgaatggatcctttgtcctggatggagcccgagacaccctgcgcgatcttcacccacgcgtccgcggacgcgtggtcc

SEQ ID NO: 993 - DNA, 457 bp, Homo sapiens
ccgcgtccgctccacaagaagggaggacgagaaaagcatggccgggactgatgtggaaatggtaaactcagtcttcagtccactccatgcacatgtatggagactactgagggaaacaagaaggacagcgataaagtaagaggagggataacccaactgtgaggagggggacatttcactgatgaaatctaaatgaggtcactttctgttgatgacatgagaagaatatgaggctgtgttcatgatgtgagaaatccttgtgctccaaacagacatgatcctcctgaagaagagacggctgcttatcaattcattgggtgaaggaaatgactacagagctggaggcatttgctcaccgcccagagcacaagacctctgacagcaccttcccggtgttcttgtctcatggtgttcgggaaggcatttgtgggaagaaatactctgaacaagtccctga

SEQ ID NO: 994 - DNA, 693 bp, Homo sapiens
  misc_feature (1)...(693): n = A,T,C or G
gtggcgcggccgaggtacaggccaagaagttatggcttcttgataggtctgaactttaaagatattaatgaataacaggcactcataggtaaatcttcttcatttcacatattgaattgtgtttactatcacagaaaacatcattccagccccatttcgaaggattccagtaaactattgaaacacaccgctcttctggaagattgggttcatgggggtgccagaacctgacattttgactgaaaggagtatcatcgatccattgccatttgccattaccttgtggatccgaaagacccaggaagtaanaaagtgactcattcagctgctgggtgatgaaattctgctccgcttcagtattgatcaccaccagatgagcccccatatgaacacagttctgctcactggtgctccagaagttcttccttggtagaaatgaggtagcagctggagccaaatgacttccagtgatttgggcagcatccccacattttttctgacaccatagtcccttcactgaagcaggtgagactggaatggtatgtgtgaagttcatatagtcttctactgggctggtccataataaattggtaagtcaccacacagctcgcaatgaaacaggtactcaagagtaacatggaaatcacagcagctgaccagagtctcagggtccagcagactcccttcccttgg

SEQ ID NO: 995 - DNA, 528 bp, Homo sapiens
  misc_feature (1)...(528): n = A,T,C or G
ttcnagtaaactattgaaacacaccgctcttctggaagattgggttcatgggggtgccagaacctgacattttgactgaaaggagtatcatcgatccattgccatttgccattaccttgtggatccgaaagacccaggaagtaagaaagtgactcattcagctgctgggtgatgaaattctgctccgcttcagtattgatcaccaccagatgagcccccatctgaacacagttctgctcactggtgctccagaagttctccttggtagaaatgaggtagcagctggagccaaatgacttccagtgatttgggcagcatccccacattttttctgacaccatagtcccttcactgaagcaggtgagactggaatggtatgtgtgaagttcatatagtcttctactgggctggtccataataaattggtaagtcaccacacagctcgcaatgaaacaggtactcaagagtaacatggaaatcacagcagctgaccagagtctcagggtccagcagactcccttcccttgg

SEQ ID NO: 996 - DNA, 291 bp, Homo sapiens
  misc_feature (1)...(291): n = A,T,C or G
aggattccagtaaactattgangcncaccnctcttctggaagattgggttcatgggggngccanaacctgacattttgactgaaaggagtatcatcgatccattnccntttgccannaccttgtggatccgaaagacccaggaagtaanaaagtgactcattcagctgctgggtgatgaaantctgctccgcttcagtatgtgatcaccnccagatgagcccccatatgaacncagttntgctcactggtgctncagaagttcttccttggtagaaatgaggtagcagctg

SEQ ID NO: 997 - DNA, 1359 bp, Homo sapiens
cacgcgtccggccaagagacatatccaaggttgagattagtttccattttctttgtactattttctggataataagacattagacatttgaagagatggagaatgaagatgggtatatgacgctgagtttcaagaatcgttgtaaatcgaagcagaaatctaaagatttctccctatatccacaatattattgtcttctgctcatatttggatgcattgtgatccttatattcattatgacagggattgacctgaagttctggcataaaaaaatggatttctcccagaatgtaaacatcagcagtctatcaggacacaattacttgtgcccaaatgactggctgttgaacgaagggaaatgttactggttttcaacttcttttaaaacgtggaaagagagtcaacgtgattgtacacagctacaggcacatttactggtgattcaaaatttggatgagctggagttcatacagaacagtttaaaacctggacattttggttggattggactatatgttacattccaagggaacctatggatgtggatagatgaacactttttagttccagaattgttttcagtgattggaccaactgatgacaggagctgtgccgttatcacaggaaactgggtgtattctgaagactgtagctccacatttaagggcatttgccagagagatgcgatcttgacgcacaatggaaccagtggtgtgtaaatgtacaaccaaatatagaaatactttgcatgttaaagcagagctagattttaaagacttaagatttttagataaagtttctaacagaaagtttctgctaacagacatcatctaaataggagaaaagtattttatcctgaattgactataaagacaacttctgaacagaacttttactctatacttggatttctggtttgtcttttccatggcattgacaagaaaagctaaataaaaaattagtaattattttaatagttatttaatagtttgatttttttgcatttaaaatagcatagaataaaacaactttaaaggaatgttatttagctatatgtgctatgtggtagattggaaggaaagaagcagtatatgtacaaatataatatttgaagcatggaattctgaatttttcatctgtgtattatagcctgaagtgtttggtggggagtgggtaatgagaaattacctactgggtataatgtacaatatttaggtgatggataaactaaaagctcagacttctccactttgtgatatatccatgtaacaaaattatgcttgtaccctttaaatgtattcaaataaaataaaataaagtcatgtggccaaatattcaaaacaaaaaaaaaaaaaaagg

SEQ ID NO: 998 - DNA, 2459 bp, Homo sapiens
  misc_feature (1)...(2459): n = A,T,C or G
ggagaaggcaaagcactgcccccaccaagaacaatttgaaaccccccccccccccatcatatttaaaatctgggacaaagaaccgtcgggacggaaatcctaccactgcaaaagctcggcgcggcctcgggagctgcccggcggccccggaccgaggcagccctcccctttaaaagaagcggaggacaggattgggatccttgaaacccgaaacccagaaacagcatcggagcggaaaccagaggggaaaccttgaactcctccagacaattgcttccggggagttgcgagggagcgagggggaataaaggacccgcgaggaagggcccgcggatggcgcgtccctgagggtcgtggcgagttcgcggagcgtgggaaggagcggaccctgctctccccgggctgcgggccatggccacggcggagcggagagccctcggcatcggcttccagtggctctctttggccactctggtgctcatctgcgccgggcaagggggacgcagggaggatgggggtccagcctgctacggcggatttgacctgtacttcattttggacaaatcaggaagtgtgctgcaccactggaatgaaatctattactttgtggaacagttggctcacaaattcatcagcccacagttgagaatgtcctttattgttttctccacccgaggaacaaccttaatgaaactgacagaagacagagaacaaatccgtcaaggcctagaagaactccagaaagttctgccaggaggagacacttacatgcatgaaggatttgaaagggccagtgagcagatttattatgaaaacagacaagggtacaggacagccagcgtcatcattgctttgactgatggagaactccatgaagatctctttttctattcagagagggaggctaataggtctcgagatcttggtgcaattgtttactgtgttggtgtgaaagatttcaatgagacacagctggcccggattgcggacagtaaggatcatgtgtttcccgtgaatgacggctttcaggctctgcaaggcatcatccactcaattttgaagaagtcctgcatcgaaattctagcagctgaaccatccaccatatgtgcaggagagtcatttcaagttgtcgtgagaggaaacggcttccgacatgcccgcaacgtggacagggtcctctgcagcttcaagatcaatgactcggtcacactcaatgagaagcccttttctgtggaagatacttatttactgtgtccagcgcctatcttaaaagaagttggcatgaaagctgcactccaggtcagcatgaacgatggcctctcttttatctccagttctgtcatcatcaccaccacacactgtagcctccacaaaattgcatcaggccccacaacagctgcttgcatggaatagcagagaataccgcctgctccctccggacagcacactcctgaaaacggggagagaggagccaaacatgctcggtttacactttccttatttactgaatgagtggagggcagagacaggcctggagttacgcacactgagtgccccaacatggaaagaaacatcaggagggacaggaaacgttccctccttaaccaacagttttcaagaccttactggaggcactttattggctacataatcactccatgcggtgggcatcaggcagaatcctggtgcagacccaactttgaggtggaggatttcacagtttctttattttgaacttcccccaggctcccactaattcctctccattctatcctcctccctttcccacaaaagaaaacagaaaggagcagcagtgtttgataccgtatcatccagaggcctggttctctcccattatagggcaaacaagccctggcaagatatttcactcccgccccatgccatgcattaaaaatccaaaattgcctatattccacctgccaagcaagagatgctttcattattgaagttccaaatgtatacctttgagaacagtgccttctcgtcttaaaagagaggtcctcattttgtgagttgggagcagagggaattaaagaaagccatgatgcagggatttggccattcaagccgggcagccttcagagaatgtcatccctaatgacacatgcccgaatgaaggagcggggctgagcttgtcctgccttcgtattgaatgttgcctgtctgcctccttaatagcgggcctctgtgtgagcatttgacaagacttaaaactattcattgaagaaaatggatgatcccccaacaggaagatgcaaccccatgggctgcctgcttgaccacagaagtgcttccagctccagttgctcatctgagaactccccccaccacttgctgttaaaattgttaaaattaaaggccatgttgattgattttttaaaaaaaaaaaaaaaananaaanaaaantcaataaanaacncttatattattaaaaaann

SEQ ID NO: 999 - DNA, 833 bp, Homo sapiens
  misc_feature (1)...(833): n = A,T,C or G
ttagggagtcgacccacgcgtccgcccccgcgtccgcccccgccgaggaaaaccgtgtactattagccatggtcaaccccaccgtgttcttcgacattgccgtcgacggcgagcccttgggccgcgtctcctttgagctgtttgcagacaaggtcccaaagacagcagaaaattttcgtgctctgagcactggagagaaaggatttggttataagggttcctgctttcacagaattattccagggtttatgtgtcagggtggtgacttcacacgccataatggcactggtggcaagtccatctatggggagaaatttgaagatgagaacttcatcctaaagcatacgggtcctggcatcttgtccatggcaaatgctggacccaacacaaatggttcccagtttttcatctgcactgccaagactgagtggttggatggcaagcatgtggtgtttggcaaagtgaaagaaggcatgaatattgtggaggccatggagcgctttgggtccaggaatggcaagaccagcaagaagatcaccattgctgactgtggacaactcgaataagtttgacttgtgttttatcttaaccaccagatcattccttctgtagctcaggagagcacccctccaccccatttgctcgcagtatcctagaatctttgtgctctcgctgcagttccctttgggttccatgttttccttgttccctcccatgcctagctggattgcagagttaagtttatgattatgaaataaaaactaaataacaattgtcaaaaaaaaaaaaaaannnnnnnnnnntnnnnnnnnnnnnnnnnnnnnnnnnnnnnn

SEQ ID NO: 1000 - DNA, 790 bp, Homo sapiens
  misc_feature (1)...(790): n = A,T,C or G
gcgtccgcggacgcgtgggcgccgaggaaaaccgtgtgctattagccatggtcaaccccaccgtgttcttcgacattgccgtcgacggcgagcccttggccgcgtctcctttgagctgtttgcagacaaggtcccaaagacagcagaaaattttcgtgctctgagcactggagagaaaggatttggttataatggtacctgctttcacagaattattccagggtttatgtgtcaggttggtgacttcacacgccataatgacactacgtggcaattccatctatggggagaaatttgaagatgagaacttcatcctaaagcataccggtccttgcatcttgtccatggcaaatgctaggacccaacacaaatggttcccagttattcatctgcactgccaagactgagtggttggatggcaagcatgtggtgtttggcaaagtgaaagaaggcatgaatattgtggaggccattgagcgctttgagtccaggaatggcaaganccagcaagaagatcaccattgcttgactgggggacaactcgaataagttngacttggggttttatcttaacccccaaaatcanttcctttttgtagcttnaggagaagcnccccttccnccccattttggcttcccagtttncctaanaatnntttgggcttctcgcntgcaagttccctttngggttccatngttttcctttgtncccttcccatgcccaancttggaattgcaaaagttaaggtttttgnttttgnaattaaaaaccttaanttcccaaaaaaaa

SEQ ID NO: 1001 - DNA, 655 bp, Homo sapiens
  misc_feature (1)...(655): n = A,T,C or G
tggcccaaagaaactataattttgaaccaacagacctctgctggcatctgcgattgcatttttcctgttttaacaacggctgtgctagacgaagtggtgaagcccaaagacttatttttgagctcgctgtaagactgagaaatcacgtagtccttcctgaaaccactaagaggaaaaatgtctgtgacactgcatacagatgtaggtgatattaaaattgaagtcttctgtgagaggacacccaaaacatgtgagaatttctttggcccttttgcccataatttataacaatggcgttatattcatacaaataaaaatcagtttacagggttcaaacaagatctaaccagcagccgcacgagaactcgaagaggagccaacaatattttagtaaagaagtttgaggattaatacagtgaataacttaatcacaattttagaggtattgtatccatggataataatggcccgaacaccaatggatctcaattcttcatcacctatggcaaacagccacatttggacatgaaatacaccgtatttggaaaggtaatagatggtctggaaactctagatgagttggagaaagttgccagtaaatgagaatacatacanacctcttaattacatacacattaacaacatggngggggng

SEQ ID NO: 1002 - DNA, 438 bp, Homo sapiens
tctttaaaactttttaaattttattataaaataacacttccaggatattgacttgctgtgggaggaatatgtaatcaggccactcaaaaatgcctgcacttgaggctgagcatttaaaaatgaatgttcatatgtaacaaaaattaaatgatgtattttttgtattaaaattaaagaaatatgttggataatcattataataaagaatatgctctaatggggataaaagctgttgggcgccccttggtaccaccatttcatagaagatcatagttgtaaaccaagcagaaggatgatgcattctctgacataattaaaaccgggtaaaccacaataagtgtgttccagcaatttgtcaagttatttgtccaggtctatcatagctactgagcaaatgggttggcatgaatagttatgtccttaatgtgtacatcatta

SEQ ID NO: 1003 - DNA, 555 bp, Homo sapiens
tcaccccgcgtccggggtccggtaacaacatggcggcgtccgtgaggggctcctttgggcaggggtagtgtttggtgtccctgtcttgcgtgatattgacaaactgaagctttcctgcaccactggacttaaggaagagtgtactcgtaggcggacagctttagtggccggccggccgctctcatcccccgtaaggagcagagtcctttgtactgaccaagatgagcaacatctacatccaggagcctcccacgaatgggaaggttttattgaaaactacagctggagatattgacatagagttgtggtccaaagaagctcctaaagcttgcagaaattttatccaactttgtttggaagcttattatgacaataccatttttcatagagttgtgcctggtttcatagtccaaggcggagatcctactggcacagggagtggtgggagagtctatctatggagcgccattcaaagatgaatttcattcacggttgcgttttaatcggagaggactggttgccatggcaaatgctggttctcatgataatggcagc

SEQ ID NO: 1004 - DNA, 484 bp, Homo sapiens
catatccaacaaaaaaacgcgtccggccaaataacctggctaccaacccggggccccagtgttgggaggagggtgatgtggggaaggacgtgactctgggacagtgcctgcctccaaaaagtgcttcctttcttcctcttcctccaggtaaattcgaaccaccattatttcacccgaatgtgtacccttcggggacagtgtgcctgtccatcttagaggaggacaaggactggaggccagccatcacaatcaaacagatcctattaggaatacaggaacttctaaatgaaccaaatatccaagacccagctcaagcagaggcctacacgatttactggttagtagcagccctggccccgctggtggcagctcctccccgtcccaacaaatgcaacctcaaaacactgggagtccaacacacactcacaccctaaactaaagccatcatcacctacacctgtcaacaaagctcggggggcataaa

SEQ ID NO: 1005 - DNA, 36 bp, Homo sapiens
  misc_feature (1)...(36): n = A,T,C or G
gttttgctngggccnntcncncacgtgngnnttngc

SEQ ID NO: 1006 - DNA, 480 bp, Homo sapiens
  misc_feature (1)...(480): n = A,T,C or G
gtccgcgccgacccggcgccattttggtggccgggcgcggaggtgattccacactgaggcgagcgcggcggcccggggtggtagtggcagtgttcgtgtgctcaggtctgaatcgccgagggaggaggcggtggaggaagaggtggcggcggtggcggtggtcgtagcggtggcggaggagngggtacgaatcaagctgcgggcggagacatggccaacatcgcggtgcagcgaatcaagcgggagttcaaggaggtgctgaagagcgaggagacgagcaaaaatcaaattaaagtagatcttgtagatgagaattttacagaattaagaggagaaatagcaggaccttcagacacaccatatgaaggaggaagataccaactagagataaaaataccanaaacatacccatttaatccccctaaggtccggtttatcactaaaatatggcatcctaatattaagttccgtcacaggggc

SEQ ID NO: 1007 - DNA, 563 bp, Homo sapiens
cgtccgctactctgtcaccaccgccagctttgtcacctatgttgtaagggaacatcaaaccaaagccaaacagttgcagcacatttcaggcattggcgtgacatgctactgggtaacaaacttcatttatgacatggttttctacttggtgcctgtagcgttttcaattggtatcattgcgattttcaaattacctgcattctacagtgaaaacaacctaggcgctgtatctctcctacttctcctgtttgggtatgcaacattttcctggatgtacttgctggctgggctcttccatgaaacaggaatggccttcatcacttacgtctgtgtcaacttgttttttggcattaattccattgtttccctgtcagtggtatactttctttccaaggaaaagcctaatgatccgactttagaacttatttctgaaaccctcaagcgcattttcctgattttcccacaattctgttttggctacggtttgattgaactttctcaacacagtcggtcctagacttcttaaaagcatatggagtggaatacccaaatgaaacctttga

SEQ ID NO: 1008 - DNA, 480 bp, Homo sapiens
  misc_feature (1)...(480): n = A,T,C or G
cggccgcgtcgacggcagaganggcactgggaggangcagtggganggcggagggcgggggccttcggggtgggcgcccanggtagggcangtggccgcggcgtggaggcagggagaatgcgactctccaaaaccctcgtcgacatggacatggccgactacagtgctgcactggacccagcctacaccaccctggaatttgagaatgtgcaggtgttgacgatgggcaatgacacgtccccatcagaaggcaccaacctcaacgcgcccaacagcctgggtgtcaacgccctgtgtgccatctgcggggaccgggccacgggacaacaccacatcagcacgaaccatgaccgacgcgcacgacactctcggagtaagcgccctgagaaccacctgcnctcatccagacacggccaaacactacngttccacaaacacaaaaacaaccanggcttcttccggaagatcaagaaaatgctt

SEQ ID NO: 1009 - DNA, 595 bp, Homo sapiens
atgagctggttagaccatttcaagaaatccagattgatgacaatgagtatgcttgtttaaaggcaattgtattttttgatccagatgcaaaagggctaagcgatccagtaaaaattaagaacatgaggttccaagtgcagatcggtttggaggactacatcaatgatcggcagtatgactcccgggggaaggtttggagagttgcttctgctcctgcccacactgcagagcatcacgtggcaaatgattgagcaaatacagtttgttaaactttttgggatggttaaaattgacaatctacttcaggaaatgctattaggtggggcttccaatgatggcagtcatctccatcatccaatgcatccacatttgtctcaagacccattaactggacaaactatacttttaggtcccatgtcaacactggttcatgcagaccagatctcaactcctgaaaccccactcccttccccaccacaaggctctgggcaagaacagtacaaaatagctgcaaaccaagcatcagtcatttcacaccagcatctctccaaacaaaagcaattgtgaaaatgtgtttacttcagaacggcagatc

SEQ ID NO: 1010 - DNA, 736 bp, Homo sapiens
  misc_feature (1)...(736): n = A,T,C or G
gccttcagtgaagaaaatattgaattttggatagcctgtgaagatttcaagaaaagcaagggacctcaacaaattcaccttaaagcaaaagcaatatatgagaaatttatacagactgatgccccaaaagaggttaaccttgattttcacacaaaagaagtcattacaaacagcatcactcaacctaccctccacagttttgatgctgcacaaagcagagtgtatcagctcatggaacaagacagttatacacgttttctgaaatctgacatctatttagacttgatggaaggaagacctcagagaccaacaaatcttaggagacgatcacgctcatttacctgcaatgaattccaagatgtacaatcagatgttgccatttggttataaaagcttaattagctgagcttgnnnnnnnnnnnnnnnnnnnnnnnnnnnnnnnnnnnnnnnnnnnnnnnnnnnnnnnnnnnnnnnnnnnnnnnnnnnnnnnnnnnnnnnnnnnnnnnncaagctnnnnnnnnnnnnnnnnnnnnnnnnnnnnnnnnnnnnnnnnnnnnnnnnnnnnnnnnnnnnnnnnnnnnnnnnnnnnccccaatataaaccccnaaagaacacttaaaaagaacattaaggagctaaatcaaataaaaccaatcaatcaaccccattaaaccagaatattaccaaccttttaaaataaccntaaataaaaaaagacccgttaaaggaaaaaatt

SEQ ID NO: 1011 - DNA, 1642 bp, Homo sapiens
  misc_feature (1)...(1642): n = A,T,C or G
catcgcagatgtgtgtgagtccatgaaggagcagctgctggttctcgttgagtgggccaagtacatcccagctttctgcgagctccccctggacgaccaggtggccctgctcagagcccatgctggcgagcacctgctgctcggagccaccaagagatccatggtgttcaaggacgtgctgctcctaggcaatgactacattgtccctcggcactgcccggagctggcggagatgagccgggtgtccatacgcatccttgacgagctggtgctgcccttccaggagctgcagatcgatgacaatgagtatgcctacctcaaagccatcatcttctttgacccagatgccaaggggctgagcgatccagggaagatcaagcggctgcgttcccaggtgcaggtgagcttggaggactacatcaacgaccgccagtatgactcgcgtggccgctttgganagctgctgctgctgctgcccaccttgcagagcatcacctggcagatgatcgagcagatccagttcatcaagctcttcggcatggccaagattgacaacctgttgcaggagatgctgctgggagggtcccccagcgatgcaccccatgcccaccaccccctgcaccttcacntgatgcaggaacatatgggaaccaacgtcatcgttgccaacacaatgcccactcacctcagcaacggacagatgtgtgagtggccccgacccaggggacaggcagccacccctgagaccccacagccctcaccgccaggtggctcagggtctgagccctataagctcctgccgggaaccgtcgccacaatcgtcaagcccctctctgccatcccccagccgaccatcaccaagcaggaagttatctagcaagccgctggggcttgggggctccaatggagaccccaatccccctaaagaaacacctcctgatcactattcacgtcaaacgaaccccacataaaagaaaaaacactgaaaaaccaacgaaaaggatccaaagaacaaaaaaacagatgaaggaccacaacccaaaaccaccctcaacaagaaaacatccaccccaaatgtccccaacaaacaaaatgaacaaacttcaaacanccctctcaataagtgtcaaaacaaaaagaacttttggaactttcncgacacaaacaaccaacattactaanacaatacnaacaaaacttttatccnccattctctatnaaaaatcaactnggaaaaaacaaccctttccacaatntccaatccccaatggttccaaaccccccccgaaacttntccattgggaaaattcccacccaacaacctngggnaacctaaggttgggggnantcccggaaaacttccggggttnacccaaaaggcttttaaaagnttttttaaaaacccggcttggaaattcaaggccttccgaaacttggttggncccttttccttaaattttggnccaagccccaatcctttgnttttggttttttggncccccccttccccccccccgnttggcccntttnccccttttgaaaanccccttggggaaaaaggggttgggcccaaacttccccccaaactttgggtttcccttttttnccccttaaanttaaaaaaaaattggaaaagggaaaa

SEQ ID NO: 1012 - DNA, 640 bp, Homo sapiens
  misc_feature (1)...(640): n = A,T,C or G
cnnnnnnnnnnnnnnnnnnnnnnnnnnnnnnnnnnnnnnnnnnnnnnnnnnnnnnnnnnnnnnnnnnnnnnnnnnnnnnnnnnnnnnnnnnnnnnnnnnnnnnnnnnnnnnnnnnnnnnnnnnnnnnnnnnnnnnnnnnnnnnnnnnnnnnnnnnnnnnnnnnnnnnnnnnnnnnnnnnnnnnnnnnnnnnnnnnnnnnnnnnnnnnnnnnnnnnnnnnnnnnnnnnnnnnnnnnnnnnnnnnnnnnnnnnnnnnnnnnnnnnnnnnnnnnnnnnnnnnnnnnnnnnnnnnnnnnnnnnnnnnnnnnnnnnnnnnnnnnnnnnnnnnnnnnnnnnnnnnnnnnnnnnnnnnnnnnnnnnnnnnnnnnnnnnnnnnnnnnnnnnnnnnnnnnnnnnnnnnnnnnnnnnnnnnnnnnnnnnnnnnnnnnnnnnnnnnnnnnnnnnnnnnnnnnnnnnnnnnnnnnnnnnnnnnnnnnnnnnnnnnnnnnnnnnnnnnnnnnnnnnnnnnnnnnnnnnnnnnnnnnnnnnnnnnnnnnnnnnnnnnnnnnnnnnnnnnnnnnnnnnnnnnnnnnnnnnnnnnnnnnnnnnnnnnnnnnnnnnnnnnnnnnnnnnnnnnnnnnnnnnnnnnnnnnnnnngcaaa

SEQ ID NO: 1013 - DNA, 301 bp, Homo sapiens
  misc_feature (1)...(301): n = A,T,C or G
nnnnnnnnnnnnnnnnnnnnnnnnnnnnnnnnnnnnnnnnnnnnnnnnnnnnnnnnnnnnnnnnnnnnnnnnnnnnnnnnnnnnnnnnnnnnnnnnnnnnnnnnnnnnnnnnnnnnnnnnnnnnnnnnnnnnnnnnnnnnnnnnnnnnnnnnnnnnnnnnnnnnnnnnnnnnnnnnnnnnnnnnnnnnnnnnnnnnnnnnnnnnnnnnnnnnnnnnnnnnnnnnnnnnnnnnnnnnnnnnnnnnnnnnnnnnnnnnnnnnnnnnnnnnnnnnnnnnnnnnnnnnnnnnnnnnnnngactct

SEQ ID NO: 1014 - DNA, 311 bp, Homo sapiens
  misc_feature (1)...(311): n = A,T,C or G
aagtnnnnnnnnnnnnnnnnnnnnnnnnnnnnnnnnnnnnnnnnnnnnnnnnnnnnnnnnnnnnnnnnnnnnnnnnnnnnnnnnnnnnnnnnnnnnnnnnnnnnnnnnnnnnnnnnnnnnnnnnnnnnnnnnnnnnnnnnnnnnnnnnnnnnnnnnnnnnnnnnnnnnnnnnnnnnnnnnnnnnnnnnnnnnnnnnnnnnnnnnnnnnnnnnnnnnnnnnnnnnnnnnnnnnnnnnnnnnnnnnnnnnnnnnnnnnnnnnnnnnnnnnnnnnnnnnnnnnnnnnnnnnnnnnnnnnnnnnngacgctagcc

SEQ ID NO: 1015 - DNA, 2660 bp, Homo sapiens
  misc_feature (1)...(2660): n = A,T,C or G
cctcggttccgttgcgtagcgtgtccctcagtgggacactgcagggtgcggggacaactacgaagatggcggttgcgcgcttggcagctgtggcggcctgggtaccttgtcggagctggggctgggcagccgtccccttcggtccccaccgtggcctcagcgtgctgcttgcacggatacctcagcgggcgccacggtggctcccagcttgtagacaaaagacgtcactctcattccttaatcgaccagaccttccaaacctggcttataagaagctaaaaggcaaaagtccaggaattatcttcatccctggctatctttcttatatgaatggtacaaaagcgttggcgattgaggagttttgcaaatctctaggtcacgcctgcataaggtttgattactcaggagttggaagttcagatggtaactcagaggaaagcacactggggaaatggagaaaagatgttctttctataattgatgacttagctgatgggccacagattcttgttggatctagccttggagggtggcttatgcttcatgctgcaattgcaccgaccagagaaggtcgtggctcttattggtgtanctacagctgcagataccttagtgacaaagtttaatcagcttcctgttgagctaaaaaaggaagtagagatgaaaggtgtgtggagcatgccatcaaaatactctgaagaaggagtttataacgttcagtacagtttcattaaagaagctgaacatcactgcttgttacatagcccaattcctgtgaactgccccataagattgctccatggcatgaaggatgacattgtaccttggcatacatcaatgcaggttgccgatcgagtactcagcacagatgtggatgtcatcctccgaaaacacagtgatcaccgaatgagggaaaaagcagacattcaacttcttgtttacactattgatgacttaattgataagctctcaactatagttaactagtatcacatgtttagttggtatgtaaactaatgtatccagaagattggaagagggataagaaatgaaagatcctgatactttaggtttttccctttcctctattttgtaaatataagatgagtattatttaatgatgtatttgcataagtaatgcaaattgtgaagaaggaccagctgctgtttagaaaattttctccttccttctgtccttgattttttttcattaaagtatttcctttttttaattcaagaaaagtttacctttcttatgcttatgttagctatgccagctcttaattgcatccttttctaattaggattattaataaagcgtgaatattttgttttttattatagacagaaatttgtaacattacttctgatttgaaaatgcaattcacaaaatatagggaaatttttattgaagtaaatttgaaatgatggagaaatttcagaagcataataaagttcacaataaggataatactttatataatgtataaagtatatatattatataatatatatgttatataaactgcacattatattcaaacttaaaattgagctttttttttaaaggcccaaaattgtacagtgatacaacggagctatttctaaaatttggcttatgtataatatatttaaatggggaactttcatctaaaacaatgatgtagtatttttaatattctgattggtaaaattaaagaggaaattaatctttatatattatttcttgcagaaacattcattattttattaatattgccctaagtacaactaggcaagtgattgccacctaaatcagaagacgttctaaagtcagtaagaaagtgtgaaatgctagtataaaggttattttttttctttcctaaataactaaagtgaggtgtagattgagccttgatattatttagttaatgttttttattaattaattttggctggactttatttagcttgattaggttattatctgtcaaaccttttaagttgacaacatgactcatatatatacatgtgtataagatgagcatgtgtcgaagacttattcgactcattaatgaggaaaccagcagatagtaaacctggttcaaagtacaattcaagaaactgagtatttatgggcattgaagaaaaaatgttgagataaaattgctgtgcagaaaaaagtgttaatgaagccgacctgactacttaaccttagagacctgctttacaaggttggcccttgattggcatctgggaacttggagttcagggggcttccaccattcccagaactgatcaaagtagcttactatatctaaactgtaaaacaatatagtttctcctgaacacctgctttccttctgggagtctggaattttggtatgtgccaggcagagactacctttgtgaccagctcccagtaaaaaccccaggcactcagtctctaacaagcttttctggttgacagtgtttcacaagtgctgttacaactggttgctgggagaattaagctcatcctctgtgattccactggcggaggattcttggaagcttgcacttagtttcccctgacttcaccccatgtgtcttttttcctttgctgattttgttttgtatcctttcactgtaataaatcatggccgtgagcagaactgtaaaaaaaaaaaaaaaaaaaaaaa

SEQ ID NO: 1016 - DNA, 556 bp, Homo sapiens
  misc_feature (1)...(556): n = A,T,C or G
cacagtccccagctgccggggggaagatgccaaggggaaggactgttgctggtatgaagcagcccttcgtgatgggaacccaattattgtttatcttcatggcagtgcagaacacagggcagcttcgcacagactgaagctggtaaaggtgctgagtgatggtggctttcatgtcttgtctgttgactacagaggatttggggactctacaggtaagcccacagaggagggactgactacggatgccatttgtgtctatgagtggaccaaggcaagaagtggcatcactcccgtgtgtctctggggccactctctgggtacaggagttncaacaaatgctgcaaaagtgctagaagaaaaaggatgcccagttgatgctattgtcttggaagctccatttaccaacatgtgggttgcaagtatcaattatcccttgttaaaggtatctgcccagatggcctgaagtaactgaagaatcacaaaagaagtgaatatgccctgccccaccttaactgatgacattccaccacaaaagaagtataaacggccgctccct

SEQ ID NO: 1017 - DNA, 629 bp, Homo sapiens
  misc_feature (1)...(629): n = A,T,C or G
gtgtgagcaataaagcttttaatcacctgggtgcaggtgggctgagtccgaaaagagagtcagcgaagggaagataggggtggggccgttttataggatttgggtaggtaaaggaaaattacagtcaaagggggtttgttctctggcgggcaggagtgggggtcgcaaggtgctcagtgggggtgctttttgagccaggatgagccaggaaaaggactttcacaaggtaatgtcatcacttaaggcaaggaccggccatttacacttcttttgtggtggaatgtcatcagttaaggcggggcagggcatattcacttcttttgtgattcttcagttacttcaggccatctgggcgtatacgtgcaagtcacaggggatgcgatggcttggcttgggctcagaggcctgacattcctgccttctatgttaataagaaatacgaaacaaaatggtcttgaagggttggggagccgaaaacgtacgtggatgtttcccacaaaaaaagggcgatgattcacagggattcttcaatcttgattagggccgattagaaccaaaagcattatagtttaagcgaaggaagtccttttgtaagnggtgaantgtggggatgttagaagaaaaattgt

SEQ ID NO: 1018 - DNA, 1850 bp, Homo sapiens
gcgtccccccacacttccgcgccagctgagcggcggtcgggcggggggagcgcggcggcccaagctcgcttggccacgcgccccgccccctcagaggccggcctcccgcacgcaccgcgcagcctgctgtgcccgtgggtcccgagtgctccgccgcccgccccgacccgggcccagccgcctccacggcccgcgctcgtactggagcgaagagcggcctcctgaaggaggggaagggacgtgggggcggccacggcaggattaacctccatttcagctaatcatgggagagattaaagtctctcctgattataactggtttagaggtacagttccccttaaaaagattattgtggatgatgatgacagtaagatatggtcgctctatgacgcgggcccccgaagtatcaggtgtcctctcatattcctgccccctgtcagtggaactgcagatgtctttttccggcagattttggctctgactggatggggttaccgggttatcgctttgcagtatccagtttattgggaccatctcgagttctgtgatggattcagaaaacttttagaccatttacaattggataaagttcatctttttggcgcttctttgggaggctttttggcccagaaatttgctgaatacactcacaaatctcctagagtccattccctaatcctctgcaattccttcagtgacacctctatcttcaaccaaacttggactgcaaacagcttttggctgatgcctgcatttatgctcaaaaaaatagttcttggaaatttttcatctggcccggtggaccctatgatggctgatgccattgatttcatggtagacaggctagaaagtttgggtcagagtgaactggcttcaagacttaccttgaattgtcaaaattcttatgtggaacctcataaaattcgggacatacctgtaactattatggatgtgtttgatcagagtgcgctttcaactgaagctaaagaagaaatgtacaagctgtatcctaatgcccgaagagctcatctgaaaacaggaggcaatttcccatacctgtgcagaagtgcagaggtcaatctttatgtacagatacatttgctgcaattccatggaaccaaatacgcggccattgacccatcaatggtcagtgccgaggagcttgaggtgcagaaaggcagccttggcatcagccaggaggagcagtagtgtgtctctcgctgtcaatgatgagttgacccggtgtgttcttgtatagtcagtggcatcagcacccgtcagccggccttttccttcaggttcgtcaggctcaccggttctcactgtgtctgggaagtaggactgatggtcatcttcatgacaggcggcatctccactaagcctgtgtaactgttccctctttggttttcttagcttttgaatttgaagaagtacttttgaagactcccattttaagaaccgtgcaaattttgctaccaaaagtcttcaccactgtgttcttaagtgaatgttaatttctgaggtttgggactttgtggtggtttttttcttcttttcttttccattcttctttctttctttttatgttgtttgctgtaaatgctgcacatccagattgcatatcaggacattggttattttatgctttcttggatataaccatgatcagagtgccatggccactaccccactgtttgctctcctgcaaatcaactgcttttaatttacacttaaacaaattgttttgagtgttagctactgcctttctagatattagtcatttggaataaaaattcaatttcactgaaaaaaaaaaaaaaaacaaaaaaagtgcctcgaactcaaccac

SEQ ID NO: 1019 - DNA, 323 bp, Homo sapiens
  misc_feature (1)...(323): n = A,T,C or G
nnnnnnnnnnnnnnnnnnnnnnnnnnnnnnnnnnnnnnnnnnnnnnnnnnnnnnnnnnnnnnnnnnnnnnnnnnnnnnnnnnangggggnggcgggaaatgnngcncntccngatngnntntnaggncattgggtnttttatgctttnttggntntaaccntgatcagngggccctggccnctnccccnctntttggtttcctgcaaannaacnggttttaatttncncttaaanaaantgntttgggggntagctncngcctttttanannttagncatttggnanaaaaattcanttttnnnnnnnnnnnnnnnnnnnnnn

SEQ ID NO: 1020 - DNA, 2139 bp, Homo sapiens
  misc_feature (1)...(2139): n = A,T,C or G
taccaatgtgaaagatgttgcagaagtgttccagaagtggctgaagatagaaaggaaaaaagtgccactgcctatcagaaaaaacaaaacaaaacatgggaaatacaaccaccaaattccgtaaagcactcatcaatggtgatgaaaacctggcctgccaaatatatgaaaaacaatcctcagctaaaagaatctcttgatccaaatacatcttatggggagccctaccagcacaatactccattacattatgctgctagacatggaatgaataaaatattagggacttttcttggtagagatggaaatccaaataaacggaatgtgcacaatgaaacatctatgcatttgttgtgtatgggacctcaaattatgatatctgaaggagcccttcatcctcgcttggcacgccccacagaagatgatttcagaagagcagattgtctgcagatgatcttaaaatggaaaggagcaaaacttgaccagggtgaatatgagagagcagctattgatgctgttgataacaaaaaaaacacacccttgcactatgctgctgcctcagggatgaaagcctgtgtagagcttttagtaaaacatgggaggacgacttgtttgctgagaatgaaaataaagatactccttgtgattgtgctgaaaagcaacaccacaaagatttggccctcaatctggaatctcaaatggtattctcacgggatcccgaggctgaagaaatagaagcctgaatatgctgcattagacaaacgagagccatatgaaggattaaggcctcaggatcttcgtagactaaaagatatgcttattgtggaaactgcagacattgcttcaggctcctctctttactgctgaagctttacttcgagctcatgactgggacagggagaaattacttgaagcttggatgtccaacccggagaactgctgccaacgatcaggtgttcaaatgccaactccaccaccaagtgggtataatgcctgggacacgctcccatctccaagaactccaaggactacacgctcttctgtcacctccccagatgaaatcagcttatctcctggggatttagacaccagtttgtgtgacatttgtatgtgcagtatctctgtatttgaagaccctgtggatatgccctgtggacatgacttttgtagaggatgttgggagtcgtttttgaatctgaaaattcaagaaggtgaagctcacaacattttttgccctgcatatgattgcttccaacttgtacctgtggatatcatagaaagtgtatgtttcaaaggagatggacaaacgatacctacagtttgatattaaggcctttgttgaaaataatcctgccattaaatggtgtcctactccagggctgtgacagagcagtaagactaacgaaacaagggtcaaatacatctggatctgatacactcagcttcccattgctgagagctcctgctgttgattgtggaaaaggacacctcttctgctgggagtgccttggtgaagcacatgagccttgtgactgccaaacatggaagaattggctgcaaaaaataaccgaaatgaaaccagaagaacttgtgggagttagtgaagcctacgaggatgccgccaattgtctctggttattaactaactccaagccttgtgccaactgtaagtctccaatacagaagaatgaaggctgcaatcacatgcagtgtgctaagtgcaagtatgacttttgctggatttgccttgaagagtggaaaaaacatagttcgtccactgggaggttattacagatgtactcgctattgaagtcattcaacacgtggaggagcaatccaaggaaatgactgtggaggctgagaaaaaacacaaaccgatttcaggaaacttgacagaatttattgcacctattataccaagatttaaaaaccatgagcataagttatcagctagaacaacgccttcttaaaacagccaaagaaaagattggagcaattgagcagagctctcaaangaaactcgaaggaggctgtccagataccacttttcattgaagatgcagttccatggtgctccttaaaaaactccggcggcatttcttcaagtggttccttatnccattatgggatttttcctgg

SEQ ID NO: 1021 - DNA, 441 bp, Homo sapiens
ccggccgtcgccgccgccgccgctactgctgcgggggccgcggggggcgcagctggggcgcggctcgtaggggaggctagggggccgtgccaggcccgaagccgaggcggggccgggatgcggcgctgaggcccagcatggccggcccgggccccaccttcccgctgcaccggctcgtctgggcgaaccggcatcgcgaactggaggccgcactgcacagccaccaggaggacccccgcgggcggaccccactggagctggccgtgtctctgggaaacctggagtctgtgagagtgctccttcgacacaatgccaacgtgggcaaagagaaccgccagggctgggcagtcctgcaggaggcagtcagcactggagaccccgagatggtgcagctggtgctccagtatcgggactaccagagggccacgcagaggctggcgg

SEQ ID NO: 1022 - DNA, 2143 bp, Homo sapiens
  misc_feature (1)...(2143): n = A,T,C or G
ccgtccggccgcccgcgctgccgccgccgccgccgccgccgctactgctgcggcggccgcggtgggcgcagctggggcgcggctcggaggggaggctagggggccgtgccaggcccgaagccgaggcggggccgggatgcggcgctgaggcccagcatggccggcccgggccccaccttcccgctgcaccggctcgtctgggcgaaccggcatcgcgaactggaggccgcactgcacagccaccagcacgacattgaacaggaggacccccgcgggcggaccccactggagctggccagtgtctctgggaaacctggagtctgtgagaagtgctccttcgacacaatgccaacgtgggcaaagagaaccgccagggctgggcagtcctgcaggaggcagtcagcactggagaccccgagatggtgcagctggtgctccagtatcgggactaccagagggccacgcagaggctggcgggcattccggaactgctcaacaaacttcgccaggcccccgatttctacgttgagatgaagtgggagttcaccagctgggtgccccttgtgtctaagatgtgcccaagcgatgtgtaccgcgtgtggaagcggggtgagagcctgcgagtagacaccagtcttcctgggcttcgagcacatgacctggcagcggggccggaggagcttcatcttcaagggccaggaggcaggagccctggtgatggaagtggaccatgaccggcaggtggtgcatgtggagacactggggctcactctgcaggagcccgaaacactgctggccgccatgcggcccagcgaggagcatgtggccagtcgcctcacctctcctatcgtctccacccacctggacactcgtaatgtggcctttgagaggaacaaatgtggtatctggggctggcggtctgagaagatggaaactgttagcggctacgaggccaaggtgtacagtgccaccaacgtggagctggtgacacgcacacgcacggagcacctctctgatcaggacaagtcgaggagcaaagcggggaagactccattccagtccttcctggggatggcgcagcagcattcctcccacaccggggcccccgtgcagcaggcagccagccccaccaaccccacagccatctcccctgaggagtacttcgaccccaacttcagcctggagtcacggaacattggccgccccatcgagatgtccagcaaagtacagaggttcaaggcaacactgtggctgagtgaagagcacccgctctccctgggtgaccaggtgacccccatcatcgacctaatggccatcagcaacgctcactttgccaagctgcgcgancttcatcactctgcgccttccacctggcttccccgtcaaaattgagattccccttttccacgtgctcaatgcccgcatcaccttcagcaacctgtgtggctgtgatgagcccctgagctccgtgtgggtgccggcccccagctctgctgttcgccgcatcagggaaccctttcccgtgcgaggtggaccccaccgtgtttgaagtgcccaacgggtacagcgtgctgggcatggagcgcaacgagcccctccgggacgaggacgatgacctcctgcagttcgccatccagcagagcctgcttgaagcgggcactgaggcggagcaggtgaccgtctgggaagccctgaccaacacccggcccggtgcccgccctcctccccaggccacggtttatgaggaacagcttcagctggagcgggccttccaggaaagcctgcagctgtccacagagcccaggggcccaggatcccctcccaggacacccccagcccccggtccacccagctttgaagagcactgcgcctggccctggagttgtcttcacgggagcaggaggagcgggagcggcgcgggcagcaggaggaggaggacttacagcggatcctgcagctgtcactcactgagcactgagccatagccccgggagggctggccaggccactccctgcccgcttttgtaatttatttatttataaactctctgctgctgagctttgggcctggagccccaggaatgagcaggcaggggagactgagatggaaataaagagactgtcgcagcaaaaaaaaaaaaaa

SEQ ID NO: 1023 - DNA, 302 bp, Homo sapiens
ctttatcttctttaaaaatcttctccttctcttttgaaattttgtcctcttttaaatcattcttcttctctaattttgagggccggtcttttgatttcttctttctctcctctttgtacagtctcagtttttcttctttcggagacttttccttcagcgatctctgccatgtgtgtctttatgtttttccttggtatcttttttctctttaaaacatttatcaaattctttgtccttctgacatttttccaggattgatttctcacttttgtccttgtcactggatttctctttgtatcttt

SEQ ID NO: 1024 - DNA, 844 bp, Homo sapiens
cagtccaaccacgccacccaccgcccgacgacctcctgaacactctcatctactaccactcctagtccttcacacttcacacgcccacggggaaaggagacacccctctacacattgctgcccgctggggctaccaaggcgtcatagagacattgctgcagaacggagcgtccaccgagatccagaacagactgaaggagacgcccctcaagtgtgcattaaactcaaagattctgtctgtaatggaagcctatcacctgtccttcgagaggaggcagaagtcgtccgaggcccctgtgcagtccccgcagcgctccgtggactccatcagccaagagtcctccacttccagcttctcctccatgtcagccggctcaaggcaggaggagaccaagaaggactacagagaggtagaaaaacttttgagagcagttgctgatggagatctagaaatggtgcgttacctgttggaatggacagaggaggacctggaggatgccggaggacactgtcagtgcagcagaccccgaattctgtcaccccgttgtgccagtgccccaatttccaccaacatacaaaaagacactcatccctcatcgacctcctggtttccaagggcgccatggtaaatgccacagactaccatggagccactccgctccacctggcctgtcagaagggctaccagagcgtgacgctgctgctgctgcactacaaggccagcgcggaagtgcaggacaacaatgggaatacgccactccacctggcctgcacctacggccacgaggacgtgagtggctcttgctgttccgggggggctgcgttcaccctttcccactcgtag

SEQ ID NO: 1025 - DNA, 603 bp, Homo sapiens
ccacgcgtccgggcggccagggggacggtgaaggttgcctcccgcccgtccgggctctgatcctccgtctccccgtcccccggcggccggcccatggcctggcggaggcccgaaccatggacctccgcaccgccgtgtacaacgccgcccgtgatggcaagctgcagctgctccagaagctgctcagcggccggagccgggaggaactggacgagctgacgggcgaggtggccggcgggggaacgccgctactcatcgccgcccgctacggccacctggacgtggtggagtacctggtggaccggtgcggcgcgagcgtggaggccggtggctcggtgcacttcgatggcgagaccatcgagggcgcgccgcgctgtgggccgcctccgcagccggccacctggacgtggtgcggagcctgctgcgccgcggggcctcggtgaaccgcaccacgcgcaccaactcacgccttttcgcgccgctgcttcgacggccacctggaggtggtgcgctacctggtcggcgagcaccaggccgacctggaggtggccaaccggcacggccacacgttcctcatgatctcgtgctacaagggccaccgtg

SEQ ID NO: 1026 - DNA, 816 bp, Homo sapiens
ccggtgagaacatgtgccttaaatattttctcttaaaagtcaaggaatagtgatatgacctattttttgtggattaaaatcatgtggatgaatcttataggtgtaagagctctcatttgacagaataaacttcactaaggaaatagcctatggaaaaaattgtataggatacagcaataactatattaacttaccttatgttctccagacttttcttcacaggaattagagattttcatttgctccttttcctcctcctggcttcaaatgtttgttgcagaggcagtctttaaaaagttgtgtctacagagctctggcagtgtttcttctgagccactctctcttcagaaaatggtatattcctatttaccagccttggggaaaactggtgtgcttgggtctggaaagattcaggtgtcaaagaaaataggacagcggccttgttttgactctcagagaaccttactaatgctgaatggtactaaacaaaaacaagtcgaagggctgccagagttactagacctgaaccttgctaaatgttcctcatcattaaaaaaattgaaaaagaagtcagaaggagaattgtcatgttccaaggagaattgcccctctgtagttaaaaagatgaattttcacaagactaatctaaaaggagaaacagccctgcatagagcttgcataaataaccaagtggagaaattgattcttcttctctctttgccaggaatagacatcaatgttaaagacaatgctggctggacgcctttgcatgaagcctgtaactatggcaacacagtgtgtgtccaggaaattttg

SEQ ID NO: 1027 - DNA, 5352 bp, Homo sapiens
  misc_feature (1)...(5352): n = A,T,C or G
atgatgagactgagagggatatggtcattttcacgcaaccaggataatctttctggagagcaatttgttcgctttgcaccttataggcctccagatatctccttgaagcctctgctctttgaagtgcccagcatcactacagagtcagtgtttgttggccgagattgggttttccacgaaatagatgctcaacttcaaagttcaaatgccagcgtgaaccaaggagtagtgattgtgggaaacattggattcggcaaaactgccatcatctccagactggtggccctcagctgccatggtacaaggatgagacagatcgcctcagacagcccacatgcctcccccaaaccacagtctgtttgcatccttcatctctttgctgttggcgtcagtgttgcactgcttggacttgagcttcgttgtgtccttgaaggggttctctcctgcttccttgtgaaaagatgtggatgccaacagagagctgccactcacacagccaccttcagcccactcatctatcaccagtggaagctgcccaggaactccggaaatgcgcaggcggcaggaggaggctatgcgaagactagcctcgcagacaatctctcctatttatttgactttggcaataaaaaaccaaacaaccttgtacagaacagtgaaaacgccaagaatgaagcctacagttttactgtggttgcctatcactattgtcaagcagataatgcctacacttgcttggtgccagaatttgtccacaatgttgctgccttgctctgccgctcacctcagctgacagcctatcgggagcagcttcttcgggaacctcacctgcagagcatgctgagccttcgttcctgtgttcaagaccccatggcctccttccggaggggagttctggagccactagaaaatctccataaagagagaaaaatcccagatgaagatttcatcattttaattgatggattaaatgaagcagaatttcacaaaccggattatggggatacaattgtatcgtttctgagtaaaatgatcggaaagtttccttcttggctcaaactaattgtaacagttaggaccagtttacaggaaattaccaagctgctgcctttccataggatttttttggatcgactagaagagaatgaagccatagaccaggacctgcaggcttacatcctgcaccggatacacagcagctcagagatccagaataacatttcacttaatggcaaaatggacaatactacatttggcaaactcagttctcatctcaagaccctcagtcaagggtcctatctatatctgaaacttacatttgacctcatagagaaaggctatctagtgttaaagagctctagctacaaagtagttcctgtttcgctctcagaggtttatttactccagtgcaatatgaagttcccaacccagtcttcctttgaccgggtgatgcctctcctgaatgtggcagtggcctctctccacccactgactgatgagcatatcttccaggccatcaatgctgggagcattgaaggcacactagaatgggaggattttcagcagagaatggagaacctctccatgttcctaatcaagcgcagagacatgactcgtatgtttgtacatccttcttttcgagaatggcttatctggagagaagaaggagagaaaaccaaatttctctgtgatccgaggagtggtcacacgttacttgccttctggttttcccgccaagagggaaaactaaaccgacagcagactattgaactgggacatcacatcctcaaagcacacatttttaagggtttgagtaaaaaagttggtgtatcatcctccatcctccaaggtctctggatctcttatagcacagaaggtctttccatggcactggcgtctttacgaaatctctacactccaaatataaaggtcagccgactgctgattttgggaggtgccaatattaattaccggacagaggttttaaataatgctccaattctatgtgttcagtcccatcttggttacacagaaatggtagccctgctgctggagttcggggccaacgtggatgcctcttctgaaagtggcctgactcccctgggatatgctgcagcagcagggtacctgagcattgtggtgctgctgtgcaagaaacgggccaaggtggatcatttggataagaacgggcagtgtgctttggttcatgctgcactccgaggtcatctggaggttgtcaagtttttgattcagtgtgactggacgatggccggccagcagcaaggagtatttaagaagagccatgccatccaacaggccctcattgctgcagccagcatgggttatactgagattgtctcctacctacttgatcttccagaaaaagatgaagaggaagtagagcgagcacagatcaacagctttgacagtctctggggagagacagccctaacagctgcagccggaaggggcaaactggaggtgtgccgtttgctcttggaacaaggggcggcancgccccagccaaaccgccgaggagcagtgccactattcagcacagtgcgccagggccactggcagattgttgatcttttactcacccatggagctgatgtcaacatggcagacaagcagggccgcactcccctgatgatggctgcttccgaaggccatctaggaaccgtggactttctgcttgcacaaggtgcctccattgctcttatggacaaagaaggattgacagccctcagctgggcttgtttgaagggccatctctcagtagtacgttctctggtggataacggagctgccacagaccatgctgacaagaatggccgtaccccactggatctggcagctttctatggcgatgctgaggtggtccagttcctggtagatcatggggccatgatcgagcacgttgactacagtggaatgcgccctttggatagggcagtggggtgccggaacacttctgttgttgtcactcttctgaanaaaggagccaagataggtccagccacatgggcgatggccacctccaagccanacatcatgatcatcctgttgagcaagctgatggaagagggggacatgttttataanaaaggtaaagtaaaggaagctgcccagcgctaccagtacgccctgaagaagttccctagagaagggtttggtgaggacttgaaaactttccgggaactaaaggtgtctctcctcctcaacctctctcggtgtcgcaggaaaatgaacgattaatcaaagaactccccctggacctttatcgtctccctggattttggaatggcggaggaatttgctactaaggccctggagctgaaaccgaaatcttatgaagcttactatgcgagagcaagggcaaaacgcagcagcagacagttcgcagcagccttagaggacctgaacgaggccatcaagctgtgtcccaacaaccgtgagatccagagacttctgctgagagtggaagaagagtgtagacagatgcagcagccacagcagccaccgccgccaccgcagcctcagcagcagttgccggaagaagcagaacctgagccacagcatgaagacatatactctgtacaggatatattcgaggaggagtacctggaacaggatgttgaaaatgtttccattggcctccagacagaggcccggcccagccaggggctcccggtcatccagagcccaccctcctctcccccgcatcgggactcagcctacatctccagctcacctcttggctctcatcaggtttttgacttccggtccagtagttctgtaggctctcccactagacagacctatcagtccacctcacctgccctttctccaactcatcagaactcacattacaggcctagcccaccacacacttccccggctcatcagggaggatcttaccgtttcagcccccctcctgtgggaggacagggcaaagaatacccaagccctcccccttcccctctccggagaggccctcagtatcgggccagccctccagctgaaagtatgagtgtctatagatcccagtctggttcacccgtgcgctatcagcaggaaacaagcgtcagtcagcttcctggcagacccaaatctccattatccaaaatggcccagcggccctaccagatgcctcagctccctgtggcagttccccagcaagggctcaggctacagcctgccaaggcccagattgtgagaagtaaccagcccagcccagccgtccattcaagcaccgtcatccccacaggagcctatggccaagtagcccattcaatggccagtaaataccagtcttcacaaggagacataggagtcagccagagccggttggtttatcaagggtcaattgggggaatcgtaggggatggaaggccggtgcagcatgtccaagccagcctgagtgcaggcgccatctgtcagcatggaggattgaccaaagaggatcttccacagcgaccttcctcagcataccgaggtggcgtgagatacagccagacaccacagatcggacgcagccagtcagcatcctattacccagtctgtcactcaaaactagatctggagcgctcctccagccaactaggttcccctgatgtgtcgcatttaatcagaagacctatcagtgtcaaccctaacgaaatcaaaccgcacccgccaactcccaggccgttgctgcattcccaaagtgtaggccttcgcttctctccatctagcaatagtatctcctccacctccaacctaactccgaccttccggccatcttcttccatccagcaaatggagatcccactgaaacctgcatatgagaggtcatgtgacgagctgtcgccagtgtctccaactcaaggaggttaccccagtgagcccacccgatccaggaccacaccattcatggggatcatagataaaacagcacggactcagcagtacccccacctccaccagcagaatcggacctgggcagtgtcatctgtggacaccgtcctcagtcccacgtctccaggcaacctgcctcagcctgagtccttcagtccaccatcatccatcagcaacattgccttttataacaaaaccaacaatgcacagaatggccatttgctggaggacgattattacagcccccatgggatgctggctaacgggtctcgtggagacctcttggagcgagtcagccaggcctcctcctatcccgacgtgaaggtagctcggactctacctgtggctcaggcataccaggacaacctgtacaggcagctgtcccgagactctcggcaagggcagacatcccctatcaaaccaaagagaccgttcgtggagtctaatgtttaa

SEQ ID NO: 1028 - DNA, 5352 bp, Homo sapiens; identical to SEQ ID NO: 1027
  misc_feature (1)...(5352): n = A,T,C or G

SEQ ID NO: 1029 - DNA, 472 bp, Homo sapiens
  misc_feature (1)...(472): n = A,T,C or G
gagggtgaccccatctgctatttttgtgctcataccaaaacaaccatttggggatgtgcctattagggctccgtaagaactcagatgcctgggaagcccagcccctcaggtgcccccacacacagccttcccttgacgcctacatttctaggcacatgtgaggcatctttcctggagccccgagccagccctgtccctccccagtgcagcatggcactcaggagatacaggctggacatggggcagtcgttctggggaggcctggcctagcagccacccacctgagccctcccggccaggcttcgtgctggggtgggccatgtgccaggacaggagggtcccggcggaaagccagccccggactcatcgtgacattgagatcccactggagggtaggggtggtaataaacttctccaaacgattcgttgttcattttnaaaaaaaaaaaaaannnnnnnnnnnnnnnnnnnn

SEQ ID NO: 1030 - DNA, 188 bp, Homo sapiens
  misc_feature (1)...(188): n = A,T,C or G
gaaccttacgctctgtttacaggctgagtccccacagcttttccagcttcagccaggccagggtcaccttnagattgaatgtgcagggcccctgaggactcatgtcctgagatggcccttnttcctgggatgggacccccgggttcaggtgagaggtgttcccgggccccttcacctggggctcaggt

SEQ ID NO: 1031 - DNA, 644 bp, Homo sapiens
  misc_feature (1)...(644): n = A,T,C or G
gtccggcttggccttggcggccgtgctctgcaggcacgtgcctccctcgggcgtgggtctgcacggagaagccggacagggcagcggccggcactaccgcgctgcgatttgctcaaagaacaataaccccctgaacatttaatattctgcccccctcccgtcgggcctcacgaggtcagagttgatgtccatttctgtggagttaactttggtgatattttgatctgccgtgatcaatatcaggaaaggccccatcttcccttcacacctggaatggacttttctgggacagtattggagacaggcacagatgtcaggacagttaaagagggagatagagttatttgcacaagaaactttaattgtatggctgaagaatgagtcactgaccagaaggacctgtggcagattccagaaaaggtctccctataagaagctgctgtcctccctataacttatggcactgcgatttttgctcttgagcattgggcccgtacccagcctgggtaatatagctgctgctggaagtgactagaagtgcaagctggcgatgcanaggggtgcgcagtccagcgtgaactacantcagggcancctgaaggatcacctggcatgggaaggcangattgtggtggtgggatttn

SEQ ID NO: 1032 - DNA, 348 bp, Homo sapiens
  misc_feature (1)...(348): n = A,T,C or G
accgcggnggcttcatgcaagctgtgggcatggncaacgatcacgaaaatcattnttcctttaaataaaatacaatcctatnnaaaggagtncttccatgagcaacaatcaaatacgtgcttatgctgcgatgcaagcaggtgaacaactggttcctnatcaanttgacgcaggcgatttacaagcccatcaagacgaagtcaaagttgaatattgtggattatgtcattcagatatttcaagtgattaataatgattggccgatcatctacttatcctgtagncgcaggtcatgaaatcattggaaccatcactgctctttggttcatgaagcgaaaggactcaaag

SEQ ID NO: 1033 - DNA, 384 bp, Homo sapiens
tatttggtgaagatcagcgttatcagcattttctacgattaaacgctggccatgctttgactgatgaaatccgccaagctattcagcagttggcggattgggtcagagaaagtctcaagtcgaaattgagttagtcgaagtctgctttcaatacgatgcgataacgtgcttgacctgaatgaagtcgctcaatggcatcgttgagctgtgacataggatagagttcaatttgcggggcgatatttttacgtgctgcaaatttgaagaagttgacgaagtgctaaaggagaacccgtcggtgaacctgttactgatttggcaccatcaatcaaagcacccgactgaaactgggaataggttctaaaagtcagacctagaaaaatg

SEQ ID NO: 1034 - DNA, 367 bp, Homo sapiens
  misc_feature (1)...(367): n = A,T,C or G
caggnaacgcggaggagccatggccaccgctaacngggccggagaaaacgggcatgccggacaggaagccgccggccctgccgagccccatncgcaacctgtaggtcaagttcaccaagatntttatcaacaangaatggcacgaatncaagagtgggaaaaagtatgctacatgtaacccttnaantcgggagcaaatatgtgaagtggaagaaggagataacgcccgacgtggacaaggctgtnggaggctncacaggttgccttncagaggggctcgccatgntgccnnctgnatgcccnnagnngtgggcngatgctgcaccagctggctgacctggnggagagggaccncgccaccttngcc

SEQ ID NO: 1035 - DNA, 379 bp, Homo sapiens
  misc_feature (1)...(379): n = A,T,C or G
cgcgtccgccgggccgagccggtgcgccgcagacnagggcgcctcgggccagggagcgcggaggagccatggccaccgctaactggggccgnggaaaacgggngngctcggacaggaagggcgccggccctgncgtgccccattcgcaacctggaggncaagttcacccaagatattttatcaacaatgaatggnacngaatccaaanagatgggaaaaaaagttttgcnacatgtaaccctncaaacttngggngagncaatatatgttgaaagtgcgaagaaagggagataaagcccgancgttngtnaccaaaggnttagtngcgagngacttgacaccaagcgttggcacntttttcagtaagngggggctnccg

SEQ ID NO: 1036 - DNA, 458 bp, Homo sapiens
cttttttttttttttttccaccaaatagtatgcttttaattgaaatccactctttagacgcctgcttttcatacagaggcaagagtcacaactgggaatcaaagatgggatgagccctagcagggcgactaagggtggcttctgcactctgccaggacagtgctccctctagctgcctagtccatgctccagattctcccaccactcctgactcaagtcctctcttggacctcacagagatgacctccttgagtttatctgccatggagccaaggatgggccatgctgttgaccctcataggatttctgggtgcacatcccaagagagagccccttagttgggccaagtgggccgtatccacacagcacatctgcccttggccctggctctcactgaatgtccatacatgtcccgcagccgagcaaaagcggggtccccagtcccggaggtagtcata

SEQ ID NO: 1037 - DNA, 427 bp, Homo sapiens
cgtccgattacagaaaggagcttcctgcacaaagtaagccaccagcgcaacatgacagtgaagaccctgcatggcccagccatggtcaagtacttgctgctgtcgatattggggcttgcctttctgagtgaggcggcagctcggaaaatccccaaagtaggacatacttttttccaaaagcctgagagttgcccgcctgtgccaggaggtagtatgaagcttgacattggcatcatcaatgaaaaccagcgcgtttccatgtcacgtaacatcgagagccgctccacctccccctggaattacactgtcacttgggaccccaaccggtacccctcggaagttgtacaggcccagtgtaggaacttgggctgcatcaatgctcaaggaaaggaagacatctccatgaattccgttcccatccagcaag

SEQ ID NO: 1038 - DNA, 580 bp, Homo sapiens
  misc_feature (1)...(580): n = A,T,C or G
actcctgaaacagatgcatcagcttccctgcaaaacaagagtccccgagtaccaaggctgggaggaaaaccatcctctccctcactctcgcctctcatgggatttggcagcaataaaaatgcaaagaaaattaagattgacctaaagaaaggccctgaaggacttggtttcactgtggttaccagagactcttccatacatggtcccggtcccatttttgtaaaaaacattttaccaaagggagcagcaataaaagatggccgcctacaatcaggggacagaattttggaggtaaatgggagagatgtcactggacgaacccaggaagagcttgtggccatgctcaggagcaccaagccagggggagacagcatcgctggtccttgccccgccaagaaaggacattttctgcccccgaanaattggttatgttccaaatttcagtccncacnganttttttaatgccnaacttttaatnacnctccaatgaaactcntttataggcntgaanaaagaatttcttaatcncaaggcttcnttcctttaccnaanatttngnatcccccctccggggttttt

SEQ ID NO: 1039 - DNA, 1178 bp, Homo sapiens
agaagatggcggcgctaggggaacccgtgcggctggagagaggcacagcacaactaaacacaacctgcccgcttcgcagacacacgccgcacacgcgctcccttggtgagcacagcagaagcagcattcggagacccgtacacccgaaaagcaaacgtcacacacccggctccgagagcggatggcggcgctaggggaacccgtgcggctggagagagatatttgtagagcaattgaattattggaaaaactacaaaggagtggagaagtaccaccacagaaacttcaggctttgcaaagagtccttcaaagtgaattctgcaatgctgtgagagaggtatatgaacatgtctatgagactgtggacatcagtagcagtcctgaagtgagagcgaacgctactgcaaaggctactgttgctgcatttgctgccagtgaaggacattctcatcctcgagttgttgagctaccaaaaacagaagagggccttggattcaatattatgggaggcaaagaacaaaactctccaatctatatatcccgaataattccaggtggaattgctgatagacatgggggcctcaaacgtggagatcaactcctctctgttaatggagtgagtgttgaaggagaacatcatgaaaaagctgtagaactgctgaaagccgcacaaggaaaggttaaattagtggtacgatacacacccaaagtcttagaagaaatggagtcgcgctttgaaaaaatgagatcagcaaaacgcaggcaacagacctaatacatttcaaaacttgatatttcattttgcgttttagctagagaagttttccttgtgacttactaatggctgcaatgccaatgattgtaagaaaacaaacaaatttatcatgaaattctccttgtccattttataaatgcctattttaacatcatttatggttccagagatgcatacacttttttctgacaagaaaaagtaaaaggtgatgagggcaattctgtcctactgtttttacaggcctttttcaaatgcagattttgccataaagttgttatagattttttaaaatgcttttttaatattaaaaatgtacttttacattcttaatctttttttagaaaggaaaagttttcttcatttaactgctgatttaaaagtaaagttctccaattcttaaaaa

SEQ ID NO: 1040 - DNA, 724 bp, Homo sapiens
  misc_feature (1)...(724): n = A,T,C or G
tnnatttgtatcctttgttcattttattgatgaaaaaactgaggcctagggagggtaatcagtccaagtcagttagccaagttagaaaaactaggtgtagagcccaggtgtcctgactttgagcagtgtgctttccactatattaggtaatcttttttctatttcacttggatttcttcagaatgccttgtaaagtgccacatacacacacgtctctttctttgcatgatgccaccctccagaccagttaattgctactttgcacattccgtcaatcaggcattgggcagctgtgatcgtagcccctcctatagctgctgcatagtcaaatatcccttcagtggctgggcagtcataacctagcccatattctatggagtccggatgatcatcatcgccctcttggctgaccttctggagatgctgcagataagcatcagtgtggaaggtggccatctcctccatggaggccactttaggcttaactatcctaataataacatacagaacaaatacatcaaacaaagaaagaaccatcgtatgccagaagctagaaacagaagccagcagtctgagaagaaaatacgtctcaacttctggttccaataggctggagtaataaacatattctgttcttccactgcactgtgcggtcttcactgcctcacatctacagtagtgactctattaataaggggcaagaagcggacgcggggtcgactcc

SEQ ID NO: 1041 - DNA, 605 bp, Homo sapiens
  misc_feature (1)...(605): n = A,T,C or G
aggcttgcggccgcgggagctgaccctgcggggtcccggggggggagggggagccgcnaagcccccactgaggccgccgctgccgggcctcccctcccccccgggcgggcgccatgcgggggagcccgggcgacgcggagcggcggcagcgctggggtcgcctgttcgaggagctggacagtaacaaggatggccgcgtggacgtgcacgagttgcgccaggggctggccaggctgggcgggggcaacccagaccccggcgcccaacagggtatctcctctgagggtgatgctgacccagatggcgggctcgacctggaggaattttcccgctatctgcaggagcgggaacagcgtctgctgctcatgtttcacagtcttgaccggaaccaggatggtcacattgatgtctctgagatccaacagagtttccgagctctgggcatttccatctcgctggagcaggctgagaaaattttgcacagcatggaccgagacggcacaatgaccattgactggcaagaatggcgcgaccacttcctgttgattcgctggnaaatgtggtaaggaactcagcnaatagccatgtaactgagcttggaagag

SEQ ID NO: 1042 - DNA, 117 bp, Homo sapiens
  misc_feature (1)...(117): n = A,T,C or G
tctagcggcccgcccnnnnnnnnnnnnnnnnnnnnnnnnnnnnnnnnnnnnnnnnnnnnnnnnnnnnnnnnnnnnnnnnnnnnnnnnnnnnnnnnnnnnnnnnnnnnnnnnnnnnnn

SEQ ID NO: 1043 - DNA, 605 bp, Homo sapiens; identical to SEQ ID NO: 1041
  misc_feature (1)...(605): n = A,T,C or G

SEQ ID NO: 1044 - DNA, 117 bp, Homo sapiens; identical to SEQ ID NO: 1042
  misc_feature (1)...(117): n = A,T,C or G

SEQ ID NO: 1045 - DNA, 1911 bp, Homo sapiens
  misc_feature (1)...(1911): n = A,T,C or G
nnnnnnnttttttttttggaagggaccactgcctttattgcctctgtgctggggtcccagcctggggttcagaggcctctgggggcaataggtgaccctggacccaaattattgctacttggccaggtcaccttggggcttcccatactgccctgagaatgggtgggatgagggcatgcaaacgatatgcaaatgacatgcaaaccaacccagaggcctctggcacatccatgggtgctggaagagtcagagcctagtggcctgggagggcgacggggcacccagctcaggcccagcctcggaggcaaggtttgagggttggggggtccctgagcatcagccctgcttctgccgctggctgaggaggagcagaagcctggtcccaagacagcaggaagaaagcaggaccctcgctaggcggccagatggcctgaggcccacccagacagggacgggacctgccctgggtcgctcagccaggcagggacagcagggaccagaatccaggtctcctgagccaggcagaagccaaagtagcttggaggctgaagtgacaaacaataaaatacagggataaataaatcaataataaatanaaagcaagcagcccagtccctgatccctggnctgagagcccttccaccattcccaattccattaggaaacaagccctggtctttgcgctnggctggccagtccagaaccctccatacagaggcaggcagggtcccggggccctcggcgtgtgcaggtctggctcagttgttattcattatccaccaggaggctgggaagaacacagtggtgagggtgtccggggcccgcaggtggtcgatgaggaatgcgctggaaggccttgctgccaggcgactgctggtgccttctccaggaggcctcatcctgccagaactcatacagggtgaaggaggcaccgtccagcatcttctgggcggacacatgcagacaatggctctgggcccctgtgaagtccacatagcagcgcagggctcggtggaagtcctgcaggccttcctctgccacctggacctgcctctgggccatgaggatgtgcaagtcaggccccttggccaggtcctcttcacgcaggggttccagccggggggccttgcactcgagctggtcgatgagctcctggaggcggttcacctggagccgccactgcatctcggcctctgagctgcgccctgtgtcagaagagccgggggaccaggtggatgaccggctgacactcctcagggctcggcgtcctgcccgccggctgccgcagagcctgctctgcgcctccacgctctctgcatctgaccgccagccatgggcctgggcctccagggtatctgacgccccctccagcgagctctgaagggcttgcagctggctcaccgtctcccgcagcaggaagcgtgtcacaaactggtccactttggaggccctctcgtactccagcttggtggcatccatggcagcgagcactgcacggttcagcgattccaatgcagccagcaccggccggtagacacccaggtgctctgagaagtagtcacacagtttttctgtttctaaattgtcggtgagatgcccatcaatgccgctgaacagttcctgcagctcccccaggctgagaaccccatcggcaaagtaattctggaattcctcaaatgagagcttcccatcatcattcttgtctgctctgcggaaaacgtcctggaagagcgtgtgtccggcgggccccgggtcgggcgcgagctgggggtgccgcggggtctggggctggggctggggcgcgggcggccggagcaggcacacggtgagcagccccgcgcacgccatggcgccgcctacccgctcgggctcggctgccagttgctgccgaccctggacgccgccgcggac

SEQ ID NO: 1046 - DNA, 363 bp, Homo sapiens
ttttaaaccaaaaacatgctttaatgccaggcaagagctacacagtcaactgatttacgggccactccataggctatgatttataaattatatattattaaatccaccgtgggcatacagatgggatgggacagcacccccagctccctcccactctgaatgatgtatgaacagttgagcactctgtagaatccttcaggtcgtaagccactttattccagtcccttgaacatcacaggactggatgggtttcccttcttttgccccaacccccgagtcttacgttttagaacagagacattagaataaaaaaaaataatagtaacgattaaaaatcatcaaacaatgaacaccacgaagtct

SEQ ID NO: 1047 - DNA, 3557 bp, Homo sapiens
  misc_feature (1)...(3557): n = A,T,C or G
gcctgcagtgtgctgtgagagatctaccactagattatctcaactttggtctcctgggaccactcctagcaatctcttctcacttgagccggaactgtcctctgcgagttctactatttcctgatcccgaagatggtctcctgttaccactcgctgctcacctgcataaactgaattcttgccgccaggatggggaaacagaacagcaagctgcgcccggaggtcatgcaggacttgctggaaagcacagactttacagagcatgagatccaggaatggtataaaggcttcttgagagactgccccagtggacatttgtcaatggaagagtttaagaaaatatatgggaactttttcccttatggggatgcttccaaatttgcagagcatgtcttccgcaccttcgatgcaaatggagatgggacaatagactttagagaattcatcatcgccttgagtgtaacttcgagggggaagctggagcagaagctgaaatgggcccttcacatgtacgacctgacggaaatggctatatcagcaaggcagagatgctaagatcgtgcaagcaatctataanatggtttcctctgtaatgaaaatgcctgaagatgagtcaaccccagagaaaagaacagaaaagatcttccgccagatggacaccaatagagacggaaaactctccctggaagagttcatccgaggagccaaaagcgacccgtccattgtgcgcctcctgcagtgcgacccgagcagtgccggccagttctgagccctgcgcccaccaatcgaattgtagagctgcttgtgttcccttttgattcttctttttaacaattttttttttttttttgccaaacaatatcaatggtgatgccgtcccctgtgcggtctgatgcgccttcctccgtgacgccttcagcttcttttgtcgtggatgcttcgtgggaatgcccagagccccagtgtgcttgtggagagcatggacagacttcgtggtgttcattgtttgatgatttttaatcgttactattatttttttttattctaatgtctctgttctaaaacgtaagactcgggggttggggcaaaagaagggaaacccatccagtcctgtgattctattgcaagcttcaaggggcttttgtttgaaagacaaaactccccacctgggtctgttgtcacacgtgccgtaggggtgatggatggcaccggatgctggattccccaagaacaagttaccctctggggtgaggctattccagcgagctgggacatttccccatgggggcccactcccctctcttccccagcaggctgtagtttctaagctgtgaacatttcaagataaattaacagaggagaggaaaaagatggctcagctattttttcacaggtttacactagttgagctaatatgcgtgtctttggaaattaaacacaaatggtaacatattccaaaaccagacccatcttgttgcctattgtgataaaataaaaagacggctgtatataacatattgggtaatgcagaccaaattaagtgttttgccttgtttaaatgaaatgcatgtttagtgagcactaatacaatcttattccagaagactgtttttagtagcttattgtgaagtaagacaactataatgaatgtctgtcttgtttggaagtcatatctgtctttgcacaaatgtaccaatcgacaagtatattttatatattccataaaaatacaaagtaaccctgactagggcccaactttaattttgaatgcatttccagagtggccatgcctagagggcagatgcagagcgggtggtagtgggacaggacaattggagcacaggaatgttaacatgtatgacaggggaccagtagggtggtttccctctcaggcccagcagcccattgacagcattagactggcggcatggtgcttttctgagcagatcaatactctgcagactcgaaaaaacatcacatacattcttggaacttcccagtggtttaatctatgtgcatggttagggagccaggtctggaatattcagtttccctgcccctgttaaagaatcagaggttgggcagtcatcaaattcatcataaagacatgggcaagtgtgtctgtggtttccaaggcccccctatggagaatccaaaagtattttccattgccgtgctctttgaatgcagacttctatttccagaagtgacagcacaagtctgagttgctgtttggtctggtgacctcagacacactaatttgaattgaaagctaagagtaaaaatttgctggttacaggcgagtcatactcttgcaagtagttagcaaagggaggcccaaattctcaaggttgttgatggggaacttgccactaagagaaggcagagaggtccctagtgggtatatttgctgccaagccacttgccaaagaagaggaaccacagaaagagagacatcatgaccaggagaaaaatgtgactagacatgctaacctccaggtttttatatatgacttgagtctgctgtaattggcagcagaaatccaaatttgtatggtagaccaaaaagaaccaaatccatagggtgaaattttgagacctagactctgtaaaaataatcctagtcttcctccaggggtcagttcctcacagtggttctgtaccaaaacttgccaaattcctccatggccaagtgttaaaatctgtgtttggaaaatagcgaattaacctaagacacagaaggcagactgggtgaggagacctagcatgccctattggcagtgctcaggagctgcatcccacttttccctgctctgaatcgaagtcctagttccttcctttgattctcctttggtaggtggaatcagttaatgttttgagaaacctgcctgggctctgcccttagtcatgacatctcgctgagccagacccactctgttccttggaacctagagctggagtgaggagtagaggtctccggctattccagaaagaaaagtgagccacatgcaggctgatgaatgccgacacttccagaatgtatagaaatagtccctgtcctggcctgccactgaccctgtctgtattttctcggaggttgtttttctccttctccttcccaggaaggtctttgtatgtcgaatccagtgcactcaagtttggccaagggactccacagcacccagaagactgcatgcctcaaggtttatgtcactcctctgctgggctgttcattgtcattgctgtgttcagggacctttggaaataaaacctgttctgtcccaaataaaaccagcctgtgatgttcaagggactggaataaagtggcttacgacctgaaggattctacagagtgctcaactgttcatacatcattcagagtgggagggagctgggggtgctgtcccatcccatctgtatgcccacggtggatttaataatatataatttataaatcatagcctatggagtggcccgtaaatcagttgactgtgtagctcttgcctggcattaaagcatgtttttggtttaaaaaaaaaaaaaaaaaaaaaaaaaaa

SEQ ID NO: 1048 - DNA, 884 bp, Homo sapiens
ttgaactcggcagtcctttatttagatcaatgcggggctgaggggccctcattccactgcagggcaaagggggaccaggcccaaggaggcctccttctgcccaaggtctggaggcagagaggggctcgcaggcggcccgagggcgccacatccaggccccggagcgcaaagccttcctcccagggggaggcagtttcccatccaccgaccaggtttccccggagagtcccagcacaaaagcagcagcgggcggtggccctgaaggctcagagcgcacccagggggacacaggcggggagcctcactcctgggcgagcatcctcgcgaactcctcgtagttcacccgcccgtcctggtccacgtcggcctcgcggatcatggcgtccagctcctcctgcggcagcggctgccccagccccgccatggcccgcctgagctcgtccacggtgatgtggccgtcgccatcctggtcgaaggcgcggaaggcgacctgcaggtcctccaggccggccctggccttccttgccgccgtcaggaactcctggaagctgatttcgccgtcgccgtcgccgtcaacctcggagatgagtttccttagctgggcctccgagaggttcttgcccgtggccttcagcgccgcgcccagctcctgggcattgatggtgccgtttccatccgtgtcaaccgcggagaaagcctttttgtactgggcctcctcctcaggagtcagctcaccggccatgcctgcgtctcctgcacctcgcggagcctccgagctgctgcccaccggccctcaacctgctgctctcagagctcgtggtccagagtgcaggcagccgcagggatccgggcagcgtctgtccggacgcgtgggtcgactccct

SEQ ID NO: 1049 - DNA, 618 bp, Homo sapiens
  misc_feature (1)...(618): n = A,T,C or G
gacaaatctttttttgctttaccagattcccagtcaatcaattggtttttgccagaaccggggcacccaggggatttttgaatagagatttcgcgcggagaagatatagatcaataaaacgggcaccgcagcccgcccgggggccctccaccttgcagtcaccaactttacaaacccttcaaaattgacctggccacccccatcgatttcagccccccttatcatctcatccacctccccatcggtcagcttcccccccaggttcgtcattacgttacgcagctctgtgctcttatttagccatccccatccttttcaaagacacggaacgcccctcggatctcccccccactgtctgtgtccttcaactttctggccaccaaggtcaggaactccgggaagtcaatgttcccgttcccatctgcatccacctcattgataataatcctcagctcctgctccagtggggttctgtcccagggatctcatcactgtccccaactccttggtggtgatagtgccatctccatccttgtcaaggaggccttctccctctttnacaagggtggtgatagtgccatctccacccacgcgtccgcccacgcgtccgcggacgcg

SEQ ID NO: 1050 - DNA, 618 bp, Homo sapiens
  misc_feature (1)...(618): n = A,T,C or G
tttctgaagacaacagtttggggccaagaatggtcatgaattcatcaaaatccaactggccatccccgtccatgtccaagcgctgcatgatgatggccagctccatctcgcttggcatgtacaacaaagagcgcatggccatgcccagctcctgcttgaagatgaagccgttcccatcccggtccagaacccgaaaggcctctcggatttcatcgagctcctccacggagatattagccagctgttcgctgtcactgccagcagagagcgatcggttgaggtaattccccttgtacaacaagccggcggtcacatggtggaacggcatcttttccctcttgctgggccggggctccgcagcccggcagccgaggcgcctccgcacagcgcggggggcttcctccgaggcccgcagggagggggcggtgcggaatggatgcgccgagcgggcagcgctcagcctctcgctcacacccccagcaggcagccgcgtccccgtgccggcatcctcgctgccgccggctccctcggcgcccccgggccgctccccacgcgcgcgccgggacctgcacgagcccccntcgtcgactcggagcgcgatctgggcgcgtgcctccc

SEQ ID NO: 1051 - DNA, 608 bp, Homo sapiens
  misc_feature (1)...(608): n = A,T,C or G
taancgggctgggggaggggnncgtggggccgacagttttgggggtgaaaaggcaaaaggcgggtgaaaggctgcctcccganactctccttgcttggaattctgcccactctgcggagttagcagtcacnacctccagcacaggatgtggtaccacagattgtcccacctacacagcaggcttcangacttgctgaagggaggagtcatatatccggcccttccacagcccaacttcaaaagcttacttcctttanctgtccattggcaccatacagcctccaagtctctgacttgtgcttggcagcaacattgaagatcattttgggccagatggtcntgtgactaaatatgatttgaattggctggtgaaaaacanctntgaagggccgaaacaaaaattctccagcctagaatactatggaatgctgaaatctaccancaagcccaattccctcggtanattgccaaaacttcttnaaaaccccgaagganngaaaaantttctccaaaactttctgccctatagaattgctttcgtanaaaatgtccnccccctccaanaaccccanaaaattttggcnnaanangntcnncttnatcaaaaa

SEQ ID NO: 1052 - DNA, 3207 bp, Homo sapiens
  misc_feature (1)...(3207): n = A,T,C or G
cccacgcgtccacgagcgggctgggggaggggagcgtggggccgacagttttgggggtgaaaaggcaaaaggcgggtgaaaggctgcctcccgagactctccttgcttggaattctgcccactctgcggagttagcagtcacgacctccagcacaggatgtggtaccacagattgtcccacctacacagcaggcttcaggacttgctgaagggaggagtcatatatccggcccttccacagcccaacttcaaaagcttacttcctttagctgtccattggcaccatacagcctccaagtctctgacttgtgcttggcagcaacatgaagatcattttgagctgaaatatgctaataccgtgatgcgctttgattacgtctggcttcgagaccactgccgctcagcatcgtgctacaactctaagactcaccagcgcagcctggatactgccagtgtggatttatgtatcaagccaaagaccattcgtctggatgagaccacactctttttcacttggccagatggtcatgtgactaaatatgatttgaattggctggtgaaaaacagctatgaagggcagaaacaaaaagtcatccagcctagaatactatggaatgctgaaatctaccagcaagcccaagttccatcggtagattgccagagcttcttagaaaccaacgagggactgaagaagttttctgcaaaactttctgctctatggaattgcattcgtagaaaatgtccctcccactcaagagcacacagagaagttggcagaaaggatcagcttaatcagagaaaccatttatgggaggatgtggtatttcacttcagacttctccagaggtgacactgcgtacaccaagctagctctggatcggcacactgacactacctattttcaagagccctgtggcattcaagtgtttcattgtcttaaacatgaaggaactggtggcaggacactgctagtagatggattctatgcagcagaacaggtacttcaaaaggcacctgaggaatttgaactcctcagtaaagtgccattgaagcatgaatatattgaagatgttggagaatgtcacaaccacatgattgggattgggccagtcttaaatatctacccatggaataaagagctgtatttgatcaggtacaacaactatgaccgggctgtcatcaataccgttccttatgatgtcgtccatcgctggtatacagcacaccggactctaacgatagagttgaggagacctgagaatgagttttgggtcaaactaaagcctggcagggtcctatttatagacaactggcgtgtcctacatggcagggaatgcttcacttgtaccgccaactgtgtggctgctatttaacaagagatgatgtattaaacactgctcgcctcttggggcttcaggcttaaaattgacagcatctggattatgaatacacctggcaccctggctaccagaatttcatatgggcagaataatattgtgtcaaactctacttcagattgtctccttatcccatcccacaaaacagaatctgtccgtttctctagtaagggagacttgttggagaggcgggactctgagttatctaatgtcagacatctagtggggcagctctcttcctcatgttataacatggatccacttgttttatttaaaccttttaatataattttggtcagtctccttcagaaatataatctccatattgataggaaagcaataattgccatgaggtaacgatttttttcccaagtagatcagttagaaagaaatgcattctagaaataacaaaaatcctgataaagcaacaatttgcaaaatgtttggtcttaggacaccttaacactcttaaaagttattgaaggccccaaggagttcttgggtgtgggtcctatctattgatactaattattttaggtattaagacttagaaatatttaaagctcaagaagaacacagaaagcacacatccctcagctatgagagagatgacataaccatatgtcatgtagcctctggaaaagtcctctgtatcctcatgagataacgagagggggaaaaaaagctactactgcctttgtaacttccacttagcctactacagggctatgcacatcttagtttccaaaagtctgcttaatttcaaaagaaaaatgcctaattgaatgtaactcatcttggtgttattatacaaaataatttttaatctgcagacccacgaaaagggtctcagggactcctccaggggtcttcagaccatactttgagaacccatgggctagcgactaccttnagacagtccttaacctaggcctgtggattaaagggtttagctgaaaccctagattcttctctgtagtctaatagaactccaaacattgtaagaattgcttggtagcataagctcagggataaggtgggaattgagttcaaatatagtgttttatcttccacacaaatcatctctataggagttaaattaggaagtcacaacagcgcctgttgaacaaactcatcagtgtggtaatcctatgagggataattgcagaaaggttttagagacttgtgaggttccatatgataattctttacacctcccccccccaagagaaagtacacagggctattctgtaatattgttcagggaaatcagcatgatagatgctgtgcctccagagagttctctggagattactacccaaatgtgtattttggcaatttggtggtatttaggatgtaatatgttttcctccatttctgctaattttctctctctctctctcataacatactatacatgctaattgccaagatttgaatgagtcaaaaaaaatagcttgctaaaaaaaaaaaaaaaatggcttcttttacgtattggcgggggcggggaggggggcagggtatgaggcttcttttccctcagctttcattgaaagtgaagctgtacaataaccacattgaccactgttnaatgangaaagagaatatnggctnggatgcacacaagaggggggaaaaggcattattagtgaagataggagttacaaagcaaagcaaagtcagtattcacatagagaatagagcctaatctgatgtttgcagggagttcctagatcacatttggcaatttacacattattttattgacctatccagtgctccaaaatgtgttccaaaatattttggcntt

SEQ ID NO: 1053 - DNA, 2924 bp, Homo sapiens
  misc_feature (1)...(2924): n = A,T,C or G
gctgcatcctactgctattttcattctatacatggaatactttgaagcacgaaaaatcattatatcttgaaataatttttaaaataatccaataacaaactcagaactactgaagaataataaagaatatgccgagtttctacattgcaaaggaaagaaatttacagattttgatgaagttcgccttgagattgaagcagaaacagatcgcgtgactggaatgaataaaggcatttcctccatacccattaatttacgagtctattccccacacgtgttaaatctaacccttattgatctacctggaataactaaagtgcctgtgggagatcagccaccagatatcgagtatcagatcagagaaatgattatgcagttcatcacgagggagaactgtctgattttagctgttactccagccaacactgatcttgcaaactcagatgcgctgaagctagctaaagaagttgatcctcaaggtctgagaaccattggagttatcaccaaactggaccttatggatgaaggaacggatgccagggatgttctagagaacaaactgttgcctcttcgcaggggttacgtgggggtggtaaacagaagccagaaggacatagatgggaagaaggacataaaggcagccatgctggcagagaggaagtttttcctttcccacccggcttacagacatatcgctgaccgaatgggaaccccacacctgcagaaggtccttaatcagcaacttaccaaccacattcgggatacccctaccaaacttcaggaacaaactacagggacagttgctctccatagaacatgaagtagaagcctacaaaaatttcaaaccagaagacccaacaaggaagaccaaagcattgctgcagatggttcagcaatttgctgtggactttgagaagagaattgaagggtcaggggatcaagtagataccctggaactctcaggtggtgctaaaatcaatcgtatttttcatgaacgctttccttttgagatagtaaagatggagttcaatgagaaagaattgcgaagagaaataagctatgcaatcaaaaacatacatggtatcaggacagggttgtttactccagacatggcatttgaagcgatagtcaagaaacagattgtaaagttgaaagggccttccttgaagagtgtggatctggtaatacaagaattaatcaacactgtgaagaagtgtaccaaaaaactggcaaacttccccagactctgcgaggaaacggaaaggattgttgctaaccacattcgtgagcgagaagggaagacaaaggaccaggtattgctattgattgacattcaagtctcttacatcaacaccaaccatgaagacttcattggcttcgcgcatgctcagcagaggagcagtcaggttcacaagaaaaccacagttggaaatcaggtgattcgcaaggggtggctcaccatcagcaacattggcatcatgaaaggcggctcgaagggatactggttcgtccttactgcggaaagcttgtcctggtataaagatgatgaggaaaaagaaaagaagtacatgcttcccttggacaacctgaaagttcgggatgtggaaaagagctttatgtctagcaagcacatctttgcactctttaatacagagcaaaggaatgtatacaaagactatcgcttccttgagctggcatgtgattcccaggaggatgtcgacagctggaaggcatctctactaagagctggggtctatcctgacaaatctgtagggaacaacaaagctgaaaatgatgagaatggacaagcagaaaacttttccatggacccacaattggagaggcaagtggagaccattcgcaacctcgtagactcctacatgtccattatcaacaaatgtatccgagatctaattccaaaaacaataatgcaccttatgatcaataacgttaaagatttcataaattccgagctcctagcacagttgtattcttcagaggaccaaaataccctgatggaggaatctgctgagcaggctcagcgccgggatgagatgcttcgaatgtatcaagcactgaaagaagcccttgggataattggggacatcagcacggccaccgtgtccactccggcaccccctccagtggatgactcctggatacagcactctcgcaggtcacctcctccaagccccacaacccaaaggaggccaacactaagtgctcccctcgcaaggcccacatccggccgaggaccagctcctgccattccctctcctggcccccactctggggctcctccagtcccattccgtccaggcccattacctcctttccccagcagcagtgactccttcggagcccctccacaagttccatctaggcctacgagggccccgcccagtgtcccaagccggagaccacccccatcaccaactcgtcccactataatccgcccactagaatcctccctgttagactaaacgaagtgtctggcatggcaattaatcactaatgaattatgcgaaagcaacatatttgataaccattgcagtaaatcatgagtagtcgcatgtgtggacatcaagtaggcaagtaaccagttttactaatgcattcatcgctcatcttcattgctcatggnatgtcaaacctttggggtttgactcagaaactgctaaccttttagaggctttatatgttgtactgaccaagggaggtttgtatagcagccctatactttggggatcatttgcctaccatggcatatatttgaaattgctttggacaagttttctaggctatctaccaggtagctcattaaacgtaattcttcaaatatgaaaaaagtgggcttagacctaaaccatacatatttcttttcccacattcttggtttaaggatggaccagggtnaaaaaatt

SEQ ID NO: 1054 - DNA, 2924 bp, Homo sapiens; identical to SEQ ID NO: 1053
  misc_feature (1)...(2924): n = A,T,C or G

SEQ ID NO: 1055 - DNA, 580 bp, Homo sapiens
  misc_feature (1)...(580): n = A,T,C or G
ccttttttttttttttttttcattctttaaattctttatttcatgtctgtttcagcagtattgaaatataggtttctcatacgtgcaattcttttatagattcaaaagtgaggtgttgtgtgaatgttacaaatcataacatgatccaaatttataagaaagtactttaaaaatcagacaaaagacttaagaattactatgttaaatttctaatccaaatgtaaaacaagaatacaggatattggcaatgctaatattcaaaatgggtttaccccagttcataattcctctgctcccctcctacctaaaatctaagaaagtattcattataaattggaagtacagaattttttaaaaggcccacctggatgctgagttgtatgattttctttacaggtacaatttacttttcagcaacctgtaagccatggaaagagtaactccatattccaacaaaaaaactcaaagctctatttggctggggaaggggtgtcaaatatgcaatggtgtggtagatccgtgctccgacaaatagtctgaagtgcaggatggctgtagaggggtcggaccactcaangcg

SEQ ID NO: 1056 - DNA, 1810 bp, Homo sapiens
  misc_feature (1)...(1810): n = A,T,C or G
ntttttttgagtttggctatttattgatgccacacagagggaggttatgattacagtctggttttaagtactgaaatatccaccaaggtaccccttgaggaggctgggtagaaggggaaatggcaaagcagcacagagatgcagggagggcaatgggctgggccgtgtatgtcatacaattattttggaggacaatgatgggtaggattgtgctttacccaccatgttttttagtaacataacttagaatactacttgaataagcagtacagacaacaggagtagcatcaaatatgttagctaggttgtaacaccaggcagttcatgtcatgtggcctctccttcaaaagtgaatcactgtggaccaagcaccagaaacatcgtcccaaagattcatcttgaagtcagaaaggagaagagctaagacctgcactctctggagtagcagtgtgcagctttcagagtttggaagattttagtcaactaaatgggatgttattatctaaaacaatataatctctcacattgtgtttcagatactggatgaaggttatcagaaacattcactgactatctgaaagcatcacagtgggatgtcagcggagacgtggctgtctcaggagattggacccaatgtcaacataaccagatccttccttctgcttaaacatctttctcacagtctggcaggaagagccatctcccaggcacacaccgcagcgatcctcggtggcattggaatcgatctcatagtcacagccaaccatcttacatatgccattaatacagacatttctgctgttgccgccttcaaagcaaggggtaccatcaatgacagcatccagcattttctcagaaaactggccatctatgggtcggcagtagagctcacaaggatgtgctgggttaaaaatgggaaaccagtggtagagttcattcttgtagggaacagtgtcaaattcactgcactgcatctgccgaaatgttggtgcctctgagcgacaggggtggacgttgcacaagcgatagcgtttttctccagtgcaatatttccctccaaactttggctcggggttgttgcagagcctctctgcgctctggactccagccccacaggtcctggaacagtgggaccagggtgaccagcggccccagcctccaggaatgctctctggtttcttccccactgtgatgcacttgcctgccatacaccacttcttctcaccacattgagttccatctgcagcagcgtccagcttagagcgacaaaagcccttcacggagcaccacagtgtctggcagacgttttctacttcctggcagaaggtagcattgggtccatattgtagctggcactggtggtgaacatcatagatcactccgggggcaatgaccttggacttcaagcctttctttttaggtatgtcatcaagacagaacccccagcctcggtccaagaagcgggtgatgtactcctcgctgcacttggaccatgtcagcggagtgggatcgtactggagctggcgggacatgatgtacggatgtctgcccacaggctcacagtcattttctttcccatcatgctggatgccgaagctgtgtcctagctcatgggcaattgtgaaagccagaagggagtcccggacgcgtgnncnactccctataannnnnnnnnnnnnnnnnnnnnnnnnnnnnnnnnnnnnnnnnnnnnnnnnnnnnnnnnnnnnnnnnnnnnnnnnnnnnnnnnnnnnnnnnnagttctttgatttgcaccaccacccggatccnggacctgnaataaagacaaaaa

SEQ ID NO: 1057 - DNA, 1053 bp, Homo sapiens
  misc_feature (1)...(1053): n = A,T,C or G
ggggctgggaaggggcagctcatgttcaggtttccaggaggggctacctgttgactgtctttgcaggaagaagaaaacacctgagtgaccagatgtcccagctccaggtgccttgccagatggccagaaccacacctcttgaagagtgacagtgctgtggagcatggtttctgcacacctggaatgactggaaccccaaagactcaagaaggagctaaagatcttgaagtagacatgaataaaacagaagttactcccaggctgtggaccacctgtcgagatggagaagtccttctgaggctatccaaacacggaccaggccatgagaccccgatgaccatccctgaattttttcgagagtcagtcaaccgatttggaacttatccagccctcgcatccaagaatggcaaaaagtgggaaattctgaatttcaaccagtactatgaggcttgtcggaaggctgcaaaatccttgatcaagctgggtttggagcgtttccacggagttggtatcctggggtttaactctgcagagtggtttatcactgctgttggtgccatcctagccgggggtctttgtgttggtatttatgccaccaactctgccgaggtttgtcaatatgtcatcactcatgccaaagtgaacatcttgctggttgagaatgatcaacagttacagaaaatcctttcgattccacagagcagcctagagcccctaaaagcgatcatccagtacagactgccaatgaagaagaacaacaacttgtactcttgggatgatttcatggaacttggcagaagtatccctgacacccaactggagcaggtcatcgagagccagaaggcgaatcaatgcgcagtgcttcatcttacactttcagggaccacaggcatacccaagggagtgatgctcagtcatgacaacatcacgtggattgcaggagcagtgacaaaggactttaaactgacagacaagcatgagacggtggttagctacctcccactcagccatattgcagcacagatgatggacatctnggtacccataaagatt

SEQ ID NO: 1058 - DNA, 538 bp, Homo sapiens
  misc_feature (1)...(538): n = A,T,C or G
gccgcctatgcgtagtctgaacgtctccctgctcacctcgacaacctctccagtcccctgccgtggaacttcctgctttaaacccaaggtggaagctgactgtggaaaggcattagacagacacttgaggaaacaacaacagctgtcctctcccttcttctggatcaaaattaacagcttccggcttttcttcagaggatctgtaattgcctctagagtctcatactcctcctcagaaatcagtctccgagaggttaacgtgtccaagatagagtcgggatcttgttggaggacactgagcaactttgttcgctgtttttctatgatttctgaggaagcaccctctgaagccatggcnnnnnnnnnnnnnnnnnnnnnnnnnnnnnnnnnnnnnnnnnnnnnnnnnnnnnnnnnnnnnnnnnnnnnnnnnnnnnnnnnnnnnnnnnnnnnnnnnnnnnnnnnnnnnnnnnnnnnnnnnnnnnnnnnnnnnnnnnnnnnnnnnnnnnnnnnnnnnnnnnnnnnnnnnnnnnnnnnnnnn

SEQ ID NO: 1059 - DNA, 626 bp, Homo sapiens
ctcctatagggcgaattggagctccccgcggtggcggcccgcccgggcaggtacgcggggaaatgcaaaaaaatcaaatcaatttaatagaatacatcagagatgttaaagatttcccaattgaagggattgtatttaaagatatttcaccacttttagcaaatggagaagtgctaaattacacaattaatcaaatggctgagttagctaaagatgcagatgttattataggtccagacgcaagaggtttcttgtttgggacacctactgcagcttttttaaaaaaaccttttattatggtaagaaaacctaaaaaattaccaggagacgttattagttttgagtatgatttagaatatggtaaatcaactctagaaatccaaactaatatgttgaaaaaaggccaaaaagtagcaattattgatgatgttttagctactggcggaacaatgaaagcgattattaacttaatcgaatctcaaggtgctgttgttcataaagtaatctttttacttgaattaggatttttaaacggaattgaaaaacttaaaaaatatgacgttagctcattaattaaagtttagtacctcggccgccaccacggggagctccaattcgccctatag

SEQ ID NO: 1060 - DNA, 49 bp, Homo sapiens
ccgcggtggcggcccgcccgggcaggtacgcggggaaatgcaaaaaaat

SEQ ID NO: 1061 - DNA, 481 bp, Homo sapiens
  misc_feature (1)...(481): n = A,T,C or G
cgtccgctccctctnnggnggtggttagaaaacccagaattcagatgctggctgatggtggctgactggaaaccgacttccagatttcttactcttgctcaagggccctcatcacgtgctacctagaggcacaggtctctaaccttactatctgacaggatggcttgccttcttcctgctgctcagacacttcctgcagggtttctcttcctagtgctttgggcctcagttctaggtgacaagctgctggtggtcccccaggatggaagccactggcttagcatgaaggagatagtagaacatctcagtgaacgaggacatgacattatggtcctagtgccagaagtcaatttgcttttgggagaatccaaatactacaggaggaaaatcttctcagttacctacagcctagaagaactgcagacccgttttcgcacctttggaaacaaccactttnttcccggtgcctccctgatgggtc

SEQ ID NO: 1062 - DNA, 1431 bp, Homo sapiens
  misc_feature (1)...(1431): n = A,T,C or G
accacgcgtccgcgccgcggggcttgcctggcgggcagggtgcgcgacgcgtgcggctgctgctgggaatgcgccaacctcgagggccagctctgcgacctggaccccagtgctcacttctacgggcactgcggcgagcagcttgagtgccggctggacacaggcggcgacctgagccgcggagaggtgccggaacctctgtgtgcctgtcgttcgcagagtccgctctgcgggtccgacggtcacacctactcccagatctgccgcctgcaggaggcggcccgcgctcggcccgatgccaacctcactgtggcacacccggggccctgcgaatcggggccccagatcgtgtcacatccatatgacacttggaatgtgacagggcaggatgtgatctttggctgtgaagtgtttgcctaccccatggcctccatcgagtggaggaaggatggcttggacatccagctgccaggggatgacccccacatctctgtgcagtttaggggtggaccccagaggtttgaggtgactggctggctgcagatccaggctgtgcgtcccagtgatgagggcacttaccgctgccttggccgcaaatgccctgggtcaagtggaggcccctgctagcttgacagtgctcacacctgaccagctgaactctacaggcatcccccagctgcgatcactaaacctggttcctgaggaggaggcttgagagtgaagagaatgacgattactactaggtccagagctctggcccatgggggttggtgagcggctatagtgttcatccctgctcctcaaaagaactgtaaaggggagcggggtcccttcatccacagctttcatcctctcagcacggatgatcatgggaggcctatttgactccaaggtagcaagtgtggtaggacatacacaaaaatcttgaggagggtagggagagaaactnaaaacaaggaccggtggggtacaaaaggggcccatgccaggaagaatgccttgccagtaggaacctccacaaggttgttccaagcttgggtggggggcttgacagacacaaaagtgcangcaccaagaatcttcacttntttcaccctgcttgggcacaagtctnactggccttcttccaggcctgggtcttgntattttcttgnnccccaccgttaattaacntggttggncnttccccaactnattttccaaaacttttccctttttcttaagccccaattggacctactaacttgaagccccttttgcttgcttgccgctttttgacaanaaaaaanaacannggacatgacttaatttaatgcaaaaanaaaagngaaggccagntcganacttataccactntttnttggacaaaggctaacacaagggttnggncccaataaaaatttttaatgatgcnaaaaaaaaaaaaaaaag

SEQ ID NO: 1063 - DNA, 1822 bp, Homo sapiens
  misc_feature (1)...(1822): n = A,T,C or G
tttttttttgttttgcttgttctcctggtttggggacatccattcggcaccttgcttgctcctctgagctgctttgaaccttgatgcatggcgacagcgcaccagaacggtgacgaagatcacaacaatgaccaccatggcaccggcgatgatggcaatcatgatggttagatagtcctcattttgatagggttggctactatcccctatgttcctgtccaacggggtctccatagtcctgcggatcaagtcatagatataggaggcatttccagcagtgtcgttaacataaaggaatacaagcacaagcgtgtgcaaagacttagggtaccccaggtcacttatgttgaccaccaaacgatgcaatcccacatcagtaggtgctggtttttcttccagagtaatgttacctgttactggatcaatccggaataagcctttattgtttccactcactatagtatactttagttcagcgttcattccagtgtcaacatccactgcaaaaacttctgctaccacggagccaggaatggctgagaggggcaccaacttaaaggaagtattagacggtggagaaatgacaactgggctgttgtcattgacatccatgacgttgatagttacttttgcagtagaggaacgaggtggttgtcctccatcagtggctttgacatcaaaagtgtaggaactctgctgctctctatcaaatgagacatttgactttatgaccccagaatagggacccaacacaaaattatcattgtcatttagaatggaaaagagtccacagctttaatctctcccagcacctgcatctgtcactgtgattaccccccacagtactatactttggcagattcctcagacacaaaaaattgaaaatgattatgagtaaacttggggctattgtcattctcatccagaacagtaacaatcacagccgcttggctttggaggggaggggtcccattatccctggcagttactgtaaaaatgaatcgttcttgttcttctctgtcaaatactctggaggctgtcaaaactcctgtttttcggtccagatcaaagaaggaggcattcggtccaagctgataaacaatgtctgcatttttcccactgtcttcatctgtggcactaatagttgttaagtataacccacgtcggttgttttcagaaactgacagctcaattacaggctggttgaaaattggtgggttgtcattttcatcctcaagcttaacccttaccagggcagtctgatttaaactgggcttcccagaatcagaggcaacaattttaaagctgaattctttggtgccctcatagtccaacaaagaagaggtctctaacaaatattggttgtcatataccgccttcaaatgaaatgggacctctctttcaataaaacagatcactttgccattcacatctgtgtccttatctgaaactgtaattagggcaatctttgtattgacaggatctttctcagataaatacacggtgccattgatgggacttataatgtacctgaggtctatattaggagggttatcatcggacgcgtggacattcaccctaaccgttgctcgagcaggagtggagctgccgtcnctagccagcnctgtcnctttgtgaatggctgtctcctctctatctaaggacctctgaactgtaatcagcccagtagtattatttaaagcananagtcntttggntgcaggggcgacctgggcaccaagaatgtaccggatttcagcattactgcctatatntgcatcagtggcatggagctnaatnacagaggtacctncgggagcat

SEQ ID NO: 1064 - DNA, 938 bp, Homo sapiens
  misc_feature (1)...(938): n = A,T,C or G
cttatttcctcagtggaaatctactcactatgatgtggtagttggcgtgttgtcagctcgcaataaccatgaacttcgaaacgtgataagaagcacctggatgagacatttgctacagcatcccacattaagtcaacgttttgaatcaggaaattgaagcgttcagtctgtccgaagacacttcatcggggctgcctgaggatcgagttgtcagcgtgagtttccgagttctctaccccatcgttattaccagtcttggagtgttctacgatgccaatgatgtgggtttccagaggaacatcactgtcaaactttatcaggcagaacaagaggaggccctcttcattgctcgcttcagtcctccaagctgtggtgtgcaggtgaacaagctgtggtacaagcccgtggaacaattcatcttaccagagagctttgaaggtacaatcgtgtgggagagccaagacctccacggccttgtgtcaagaaatctccacaaagtgacagtgaatgatggagggggagttctcagagtcattacagctggggacgggtgcattgcctcatgaattcttggaaggtgtggagggagttgcaggtggttttatatatactattcaggaaggtgatgctctcttacacaaccttcattctcgccctcaaagacttattgatcatataaggaatctccatgaaggaagatgccttactgaaggaggaaagcagcatctatgatgatattgtttttgtggatgttgtcgacacttatcgtaatgttcctgcaaaattattgaacttctatagatggactgtggaaacaacgagcttcaatttgttgctgaagacagatgatgactgttacatagacctcgaagctgtatttaatagggattgtccaaaagaatctnggatgggcctaatttttggtgggggaaantttc

SEQ ID NO: 1065 - DNA, 608 bp, Homo sapiens
  misc_feature (1)...(608): n = A,T,C or G
gcgtccgccagggaggggccctagagcccactctgaggaatcaagatgcccacagagtgtattttcagtggccttggttccagacaggatgtcagggtaaccctggcaggcaaggtgcccgccagcctcttgccgcccgcacagatgcggngtaagctccaggaccaccctctgtcccccgcccccagccctgccatcaccctgcgactcggacccctgcttcaacggaggctccttgcgatgcccatgacgactcctacacctgcgagtgcccgcgcgggttccacggcaagcactgcgagaaaggtatggcgggcaggggcgtccgggccggcgtcagcaccctggagagcgcccgcggtccgccgtcctgcttctctgctgtctctctccttgtttcgcgaattgctgacctcgtctagagccttgcctgatgtgctgctctgttctgtgtatttagaggtgagcacctcactgtttggatggttntgatctgcaccaagtgccaggcctgctggtcattaccttgctcttctgaaaatagctttcattgcctgctcaagantttttccaaanggatttagaatcattatatcaatttattttta

SEQ ID NO: 1066 - DNA, 488 bp, Homo sapiens
cgtccgaccaacgggactgtaaattgacatgcaactatggtaacggcggctgccagcacacgtgtgatgacacagagcagggtccccggtgcgggtgccatatcaagtttgtgctccataccgacgggaagacatgcatcggggaaaggcggctagagcagcacatccccactcaagccgtttctaatgagacctgtgctgtcaacaacgggggctgtgacagtaagtgccatgatgcagacgactggtgttcactgcacctgccctgtgggcttcatgctgcagccagacaggaagaacgtgcaaagatatagatgagtgccgcttaaacaacgggggctgtgaccatatttgccgcaacacaagtgggcagcttcgaatgcagttgcaagaaaggctataagcttctcatcaatgagaggaactgccaggatatagacgaagtgttcctttgatcgaacctgtgaccacatatgtgtcaacacacc

SEQ ID NO: 1067 - DNA, 517 bp, Homo sapiens
gcgtccgagctgctcctcaaagcttcttaccatctctgagaagcctgtcgggcgccccctgcaggctgtcccgggcagagtccgaacgcagatgtcgtgcacctgggcagcccccagggagcgctctgtgccatgaccgtggccggtgcgagtgtggggtctgcatctgtcacgtgaccgaacctggcacctacttcggtccactgtgtgagtgccatgagtgggtatgcgagacctacgacgggaaaacctgtgcaggccacggtaattgtgactgcggcaagtgcaagtgtgatgtgggatggtctggggaagcttgtcagtacccaaccaagtgtgacctgaccaaaaaaatcagcaaccagatgtgcaagaactcccaagatgtcatctgctccaatgcaggtacatgtcactgtggcaggtgtaagtgtgataattcagatggacatggacttcatttatggtaaattttgtgaatgtgatgataggagaaatgcatagatgatgaaacaga

SEQ ID NO: 1068 - DNA, 477 bp, Homo sapiens
caaaataatgatttattacgccttcagctatttacaaagatgatctggttggaaatgtcacatggcttgggtaaaatattcttctatgatggaaggtctcttttcatttcacctgctggcgtgagttaatattcaaaacgcatgttggttttctagagtcatggctgccagtatttgctctagccttcttacgatatttcctcctggtgcagtagacacatgacgagagtgatgattagcatcacagcaaaacacggtgaccgtggaagaaacagcgatgataacagtgtctcgggtggaccctctcttctcacaccttttgcccatgtaccaccagtcttctcctgcaggacacttgcactcagctctgccatcttggacaacacagatgccaccgctctgacatacaacctcagagcaggcattatggacagccaaggtggggactgggtcgggggacagctgatgtagaattga

SEQ ID NO: 1069 - DNA, 478 bp, Homo sapiens
cgaccacgcgtccgcagcctagcatcttgacccatatctgtactattgcagatggtcactctgaaggacaccctgccctcagttcctatgatgcagttatccaaaagtgttcatcttagcccctggtttcaccctcaacgacgatggaaggtcttgccaagatgtgaacgagtgcgaaactgagaatccctgtgttcagacctgtgtcaacacctatggctctttcatctgccgctgtgacccaggatatgaacttgaggaagatggcattcactgcagtgatatggacgagtgcagcttctccgagttcctctgtcaacacgagtgtgtgaaccagccgggctcatacttctgctcgtgccctccaggctacgtcctgttggatgataaccgaagctgccaggatattcaatgaatgtgagcacccgaaaccacacgtgtaccttactgcagacttgctacaatctacaagggggct

SEQ ID NO: 1070 - DNA, 727 bp, Homo sapiens
ttggatcgaccgcccgtccttacagccctgcaggaacttccccgagggctgcgatgaggccggccgctgcctatgccagcctgagtttgctggacctcattgtgaccggtgccgccctggctaccatggtttccccaactgccaagcatgcacctgcgaccctcggggaagccctggaccagctctgtggggcgggaggtttgtgccgctgccgccccggctacacaggcactgcctgccaggacgcgtccgccggctttacggcttccccagctgtgtcccctgccactgctctgctgaaggctccctgcacgcagcctgtgacccccggagtgggcagtgcagctgccggccccgtgtgacggggctgcggtgtgacacgtgtgtgcccggtgcctacaacttcccctactgcgaagctggctcttgccaccctgccggtctggccccagtggatcctgcccttcctgaggcacaggttccctgtatgtgccgggctcacgtggaggggccgagctgtgaccgctgcaaacctgggttctggggactgagccccagcaaccccgagggctgtacccgctgcagctgcgacctcaggggcacactgggtggagttgctgagtgccagccgggcaccggccagtgcttctgcaagccccaacgtgtgcggccaggcctgcgcgtcctgcaaggatggctttctttggactggatcaggctgactatt

SEQ ID NO: 1071 - DNA, 507 bp, Homo sapiens
cgaccccgcgtccgggaagcccccaagcgggtcagcctggccctccagctccctgaacacggcagcaaggacatcggaaacgtccctggcaactgttcagaaaacccctgtcagaatggaggcacttgtgtgccgggcgcagacgcccacagctgtgactgcgggccagggttcaaaggcagacgctgcgagctcgcctgtataaaggtgtcccgcccctgcacaaggctgttctccgagacaaagtcctttccagtctgggagggaggcgtctgtcaccacgtgtataaaagagtctaccgagttcaccaagacatctgcttcaaagagagctgtgaaagcacaagcctcaagaagaccccaaacaggaaacaaagtaagagtcagacactggagaaatcttaaggatttaagacgttcttgttacactccaccaacctcacaagtttctaacacccaggaagatgaggtctaaaaactggatgaaaaaggacaccctgagaaaag

SEQ ID NO: 1072 - DNA, 447 bp, Homo sapiens
  misc_feature (1)...(447): n = A,T,C or G
acncgtccgcccacgcgtccgctgccgcgacggcaagtgcgagtgcagccctggctggaatggcgaacactgcaccatcgagggttgccctgggttgtgcaatggcaacggcagatgtaccttagacctgaatggttggcactgcgtctgccagctgggctggagaggagctggctgtgacacttccatggagactgcctgcggtgacagcaaagacaatgatggagatggcctggtggactgcatggaccctgactgctgcctccagcccctgtgccatatcaacccgctgtgccttggctcccctaaccctctggacatcatccaggagacacaggtccctgtgtcacagcagaacctacactccttctatgaccgcatcaagttcctcgtgggcagggacagcacgcacataatccccggggagaacccctttgatggagggca

SEQ ID NO: 1073 - DNA, 430 bp, Homo sapiens
  misc_feature (1)...(430): n = A,T,C or G
tccggtgagtgtaacgatggcttacagccngccccactcaggatgagtgcttggacaaccgggaagggtactgcttttcggaggtcttgcaaaacatgtgccagattggctcaagcaacaggaaccccgtcaccaagtccgagtgctgctgtgatggagggagaggctggggaccccactgtgagatctgccctttcgagggcacagtggcttacaagaagctctgtccccacggccgaggattcatgaccaacggagcagatattgatgagtgcaaggttattcatgatgtttgccgaaatggggagttgtgtcaacgacaggagggtcctatcactgcatctgtaaaactggctacactccggatataacagggaccgcatgtgtagatctgaatgaatgcaaccaggctcccaaaccctgcaatttt

SEQ ID NO: 1074 - DNA, 338 bp, Homo sapiens
  misc_feature (1)...(338): n = A,T,C or G
gccncgcgtccggctgaccctcagcgcntnccctccaacccttnccaccgtatccagtgngcngcangctacgagcaaagtgagcacaangtgtgccaagacatnnacgagtgcactgcangggcncacaantgtngagcanaccangtgtgcatnaatntacggngatcctttgcatgtcagtgccctcntggatatcagatgcgaggngaagcagngcagtatgacatagatgaangtnccatccctccatnttgccaccaaagatgcgngaatacaccaggctcattttattgccagtgcantcctgggtttcanttggcagnatacaactatac

SEQ ID NO: 1075 - DNA, 424 bp, Homo sapiens
  misc_feature (1)...(424): n = A,T,C or G
aaaagcccncttganntaggaacnccacacatttccaacttgnacatccagtcnatgggcccnttttcattncactncaaaggctcacacagggagagcggggttggntcccacccnngaccaccnttcaccanatgcgccacactgagtncaganagaannaagacatttctgggacaangcatagcannaaanacggcaaggtacagangntgttgnagcatggcagactaacancngtgaagatgacaggnngcagaactcnatagcananacccaggtcacgnggctgatcaaaatnacgncaagnccaacagtgnnctccatggtgtagnangaagtaacaacncagcactgtgcagacccacagcgagaggagtgtggnctcnaacccccagtaagcaccctcacatctccanggaaa

SEQ ID NO: 1076 - DNA, 393 bp, Homo sapiens
ctcctccacctgcttttccatcttccaggagcagtgtgtgcccagccctgcccaccagggacatttggccagaactgcagccaggattgtccttgccaccatggagggcagtgtgaccacgtgactggacagtgccactgtacagctggatacatgggggacaggtgccaagaggagtgccccttcgggtccttcggcttccagtgctcacagcgctgtgactgccacaatggggggcagtgttcacccaccacgggtgcctgcgagtgtgagcctggctacaagggcccacgctgccaggagcgactgtgcccggagggcctgcatggcccaggctgcaccctgccctgcccctgtgacgctgacaacaccatcaagctgccacccagtaac

SEQ ID NO: 1077 - DNA, 500 bp, Homo sapiens
  misc_feature (1)...(500): n = A,T,C or G
gtgccgnggccggncggctccgcgtgcgagtgtaccgncggctnccagcttgacgcctcccgtcccgctgcgtggatatcgacgagtgccnanagctgaaccagcacgggctgctgtgcangagcnagcgctgcgtgaacaccantgnctccttccgctgcnnctgcaaagccggcttcncgcgcanccgcccgncggggcctgctgttcccagtgcctgacnatgacgcnggcgactgccggcctcggaccagaccttggtgatcactgacggattnccgcgagctcggcctcacttctgccccggacttgtggctcgggacccagggaccttnagggccngtgaccctngccngtccttgagaccagaggcgccnctaccggncnncntncncggttagcggacggntgtaaggtcttcngcggacgctgactgccttcctcccagagggtgttttctagaaactgataaatcatgatngtgcctctttaaaaaaaaa

SEQ ID NO: 1078 - DNA, 506 bp, Homo sapiens
gcgggcgatgcccagcggcgcggcgggctgcggggcccggcggggcgcgcatacaagcgtcccgcggcgctgaggcggcggagcgtggccccgccatgggcttcctgcaccagctgcagctgctgctctggaagaacgtgacgctcaaacgccggagcccgtgggtcctggccttcgagatcttcatccccctggtgctgttctttatcctgctggggctgctacagaagaagcccaccatctccgtgaaggaagtctccttctacacaagcggcgcccctgacgtctgccggcatcctgcctgtcatgcaatcgctgtgcccggacggccagcgagacgagttcggcttcctgcagtacgccaactccacggtcacgcagctgcttgagcgcctggaccgcgtggtggaggaaggcaacctgtttgacccagcgcggcccagcctgggctcagagctcgaggccctacgccagcatcttggaggcccttagtgcgggcccgggca

SEQ ID NO: 1079 - DNA, 515 bp, Homo sapiens
cgcccccgcacctcggggagccacctggacaagatccacagtgtcttccttctctctggactcggtggccagaaacccgcaggagctctggcgtttcctgacgcaaaacttgtcgctgcccaatagcacggcccaagcactcttggccgcccgtgtggacccgcccgaggtctaccacctgctctttggtccctcatctgccctggattcacagtctggcctccacaagggtcaggagccctggagccgcctagggggcaatcccctgttccggatggaggagctgctgctggctcctgccctcctggagcagctcacctgcacgccgggctcgggggagctgggccggatcctcactgtgcctgagagtcagaagggagccctgcagggctaccgggatgctgtctgcagtgggcaggctgctgcgcgtgccaggcgcttctctgggctgtctgctgagctcggaaccagctggacgtggcaaggtctcccagcagctgggcctggatgccccc

SEQ ID NO: 1080 - DNA, 465 bp, Homo sapiens
  misc_feature (1)...(465): n = A,T,C or G
gtccggaaggttccctgaatacacttactgctcattttacangatttctcctgattccatggattacttaggagcttcagaatctgaaattgtatacctggcactgctaataaaatgaactgcaggaagaaactaatgagaaaggatcctgtgttcagaatttctccaagaagcaacgctatttttccaaacccagaagagcctgaaggagaggaggaagatatccagatggaaagaatgagaacagtgaatgctatggctgtgcgagactttgatgagacacccgtcatcattgccagctgtctaccggaaggaatatgcaggcaaaaagaaaaattgcttttctaaaaggaagaaaacaattgccacaagaaatgtctctttttgtgttaaaaaaggtgaagttatagggactgttaggacacaatggagctggttaaagtacaactattaagatgataactg

SEQ ID NO: 1081 - DNA, 588 bp, Homo sapiens
cctttttttttttttttctggatttaaattttatttttcttttcacctgtgttattgatgatcaacaggctggtacggggttcctggggaagttgtccaggagagagaaaatacaattcgtttttaaattcccaatcgatcttttcatttaacatagcatatattatattttcaacaatcaaagggaatattgcgattccaaataccaataatctaaacaataaagaaaaattagcatattaatctccaggaattttatttatttagtaagacattccacaagtatttgttgagtgccaagcctgccttatgccaatcatgattctaggtgctaaaattctgaagataataccctagcatgctacacagtaccagaaggcattactatataaacaccaggttatcaaaccatgaaaacaaaacacacctgcacgtataagcttaatcgagtgtgaacatacaggtattcccactgtcagaaaaattaaatgctggaatttatccaccccgtggcaggaatggcagatattgcgttctagttttaaattatcttctgggttggaacctcttttgaaattcatgatctaa

SEQ ID NO: 1082 - DNA, 1350 bp, Homo sapiens
tcttagatgagaaacctgttataattgccagctgtctacacaaagaatatgcaggccagaagaaaagttgcttttcaaagaggaagaagaaaatagcagcaagaaatatctctttctgtgttcaagaagatgaaattttgggattgctaggacccaatggtgctggaaaaagttcatctattagaatgatatctgggatcacaaagccaactgctggagaggtggaactgaaaggctgcagttcagttttgggccacctggggtactgccctcaagagaacgtgctgtggcccatgctgacgttgagggaacacctggaggtgtatgctgccgtcaaggggctcaggaaagcggacgcgaggctcgccatcgcaagattagtgagtgctttcaaactgcatgagcagctgaatgttcctgtgcagaaattaacagcaggaatcacgagaaagttgtgttttgtgctgagcctcctgggaaactccccttccgtgctcctggatgaaccatctacgggcatagaccccacagggcagccagcaaatgtggcaggcaatccaggcagtcgttaaaaacacagagagaggtgtcctcctgaccacccataacctggctgaggcggaagccttgtgtgaccgtgtggccatcatggtgtctggaaggcttagatgcattggctccatccaacacctgaaaaacaaacttggcaaggattacattctagagctaaaagtgaaggaaacgtctcaagtgactttggtccacactgagattctgaagcttttcccacaggctgcagggcaggaaaggtattcctctttgttaacctataagctgcccgtggcagacgtttaccctctatcacagacctttcacaaattagaagcagtgaagcataactttaacctggaagaatacagcctttctcagtgcacactggagaaggtattcttagagctttctaaagaacaggaagtaggaaattttgatgaagaaattgatacaacaatgagatggaaactcctccctcattcagatgaaccttaaaacctcaaacctagtaattttttgttgatctcctataaacttatgttttatgtaataattaatagtatgtttaattttaaagatcatttaaaattaacatcaggtatattttgtaaatttagttaacaaatacataaattttaaaattattcttcctctcaaacataggggtgatagcaaacctgtgataaaggcaatacaaaatattagtaaagtcacccaaagagtcaggcactgggtattgtggaaataaaactatataaacttaaaattttttaaaaatatgacttttttaccttttac

SEQ ID NO: 1083 - DNA, 527 bp, Homo sapiens
gtttttaaaaaaattaatgtgggctttttaattctttctcagtgggagggtgagtttgaataaacctttcttccacatgagaagtattttacaagttgcttgtcaaatttaaaagaaaatgatcaaatcttcaagaaaatgatcaaatcttctgtgacaaaaaaatggacaaatattcaccattgagtgtgaatgccatggtgatgctaattctgattatttttcttttcttttagccataccttcagagtgttattttcctttttgtcataaggtgtctggaaatgaagtatggaaatgaaataatgaataaagacccagttttcagaatctctccacggagtagagaaactcatcccaatccggaagagcccgaagaaagaagatgaaagatgttcaagctgaaagagtccaagcagcaaatgcactcactgctccaaacttggaggaggaaccagtcataactgcaagctgtttacacaaggaatattatgagacaaagaaaagttgcttttcaacaagaaaga

SEQ ID NO: 1084 - DNA, 713 bp, Homo sapiens
cttcttgattctcttttcaatacatttaatttactacttctccatttctgggattcccaggcttcccatgggaactcatgtttgttttggtggtatgccataattggttgtgccagcttctcttgtattcctcatgtacgtgctttcattcatcttttgccaagtggagaaaaaataatggcttttggtcttttggcttttttattgtcttaatatgtgtatccacaattctggtatcaactaagtaagaaaaacccaacttaattttgtgcatgatattcataccttcctttactttcctaggatatgtcgttattgatccagctcaactttatgtatatgagaaacttggacagtctggacaatagaataaatgaagtcaataaaaccattcttttaacaaacttaataccataccttcagagtgttattttcctttttgtcataaggtgtctggaaatgaagtatggaaatgaaatcatgaataaagacccagttttcagaatctctccacgaagtagagaaactcataccaatccagaagagcatgaagaagatgttcaagctgaaagagtccaagcagcaaatgcactcactactccagacttggaggaggaaccagtcataactgcaagctgtttacacaaggaatattatgagacaaagaaagttgcttttcaacaacaaagaagaaagcagccatcagagatgtt

SEQ ID NO: 1085 - DNA, 974 bp, Homo sapiens
gcggccgcgccctcgcacagatcccagctgggtcacccgcactgagtcaacagactgagcgcgtccaggcctgacagctctgcggctcgggccctgagagacagcgtctcgggctagagtgcagtggtgcgatcaaagttcactgcagccttgaacgtctggactctagggaccctgctgactagctggggctacaggcgtctgcccccgcccacaggtttattcagaaaacatgtccactgcaattagggaggtaggagtttggagacagaccagaacacttctactgaagaattacttaattaaatgcagaaccaaaaagagtagtgttcaggaaattctttttccactattttttttattttggttaatattaattagcatgatgcatccaaataagaaatatgaagaagtgcctaatatagaactcaatcctatggacaagtttactctttctaatctaattcttggatatactccagtgactaatattacaagcagcatcatgcagaaagtgtctactgatcatctacctgatgtcataattactgaagaatatacaaatgaaaaagaaatgttaacatccagtctctctaagccgagcaactttgtaggtgtggttttcaaagactccatgtcctatgaacttcgtttttttcctgatatgattccagtatcttctatttatatggattcaagagctggctgttcaaaatcatgtgaggctgctcagtactggtcctcaggtttcacagttttacaagcatccatagatgctgccattatacagttgaagaccaatgtttctctttggaaggagctggagtcaactaaagctgttattatgggagaaactgctgttgtagaaatagatacctttccccgaggagtaattttaatatacctagttatagcattttcaccttttggatactttttggcaattcatatcgtagcaaaaaaaaaaaaaaaaa

SEQ ID NO: 1086 - DNA, 642 bp, Homo sapiens
  misc_feature (1)...(642): n = A,T,C or G
cgcgtccggattttcagttgcatgtaataccaagaaatcgaattagttttccgttcttatgggaattgttagcaatgcccttattggaatttttaacttcacagagcttattcaaatggagagcaccttattttttcgtgatgacatagtgctggatcttggttttatagatgggtccatatttttgttgttgatcacaaactgcatttctccttatatttggcataaagcagcattcagttgattattaaaaaaaagtntcaattcttcagnttatcggtatttcaagggcctcttggccctttcagncataaatgngtgttgggaccaggccttctgggnttgngacnaatttccatttaacaccttttctatgnaattttcntccttttttccaaattaacaattttttaaaattttataacctaancttttcnttcaattttttacttngggggaaatttcnncaaggccttttccncaattngggggggaaacctccnattgtttttcgttttttttggnttnggnttanttgtccaattaaaatntgggggttttgatggccangcctttccntaatnttggtaattttcccttncaatngtttaccgnttgcctttttcaattttnattcctttt

SEQ ID NO: 1087 - DNA, 728 bp, Homo sapiens
  misc_feature (1)...(728): n = A,T,C or G
cctttggcagtagatgactttgaaaacagaaatggtactgatggcctctcatacaatggagctatcatagtttctggtaaacaaaaggattatagattttcagttgtgtgtaataccaagagattgcactgttttccaattcttatgaatattatcagcaatgggctacttcaaatgtttaatcacacacaacatattcgaattgagtcaagcccatttcctcttagccacataggactctggactgggttgccggatggttcctttttcttatttttggttctatgtagcatttctccttatatcaccatgcgcagcatcagtgattacaagaaaaatgctaagtcccagctatggatttcaggcctctacacttctgcttactggtgtgggcaggcactagtgggacgtcagcttcttcattttaattctccttttaatgtatttaattttctacatagaaaacatgcagtaccttcttattacaagccaaattgtgtttgctttggttatagttactcctggttatgcagcttctcttgtcttcttcatatatatgatatcatttatttttcgcaaaaagagaaaaaacagtggcctttggtcattttacttcttttttgcctcaccatcatgttttccatcactttaatcaatcattttgacctaagtatattgattaccaccatggnanttgggtccttcatatacccttgcttnggatttaa

SEQ ID NO: 1088 - DNA, 781 bp, Homo sapiens
  misc_feature (1)...(781): n = A,T,C or G
gaagaagcagcaataaagaagttgtaatcgttacctagacaaacagagaactggttttgacagtgtttctagagtgctttttattattttcctgacagttgtgttccaccatgattactttctccttcagcgaataggctaaatgaatatgaaacagaaaagcgtgtatcaancaaaccaaagcacttctgtgcaagaattttcttaanaaatggaggatgaaaagagagagcttattggaatggggcctctcaatacttctaggactgtgtattgctctgttttccagttccatganaaatgtccagtttcctggaaatggctcctcagaaatctgggaagtccagataaattaatanctcttctttaatggttgtgtatacaccaatatctaatttaacccagcanataatgaataaaacagcactttgctcctcttttgaaaggaacaagtgtcattggggcaccaaataaaacacacatggacgaaatacttctggaaaatttaccatatgctatgggaatcatctttaatgaaactttctcttataagttaatatttttccagggatataacagtccactttggaaagaagatttctcaggtgactttccatatcaaatatcattatggaatttttcatgttttcaacataaagaacagagggaggttgggcaacaganatgctttcaatgncccatgngaaaaccngggaaggccatttaattgntgaacttatttcaaggtcaatcgtatgttcctactacaggatgactgcaa

SEQ ID NO: 1089 - DNA, 241 bp, Homo sapiens
  misc_feature (1)...(241): n = A,T,C or G
gagtttttctctagatgnctacggccgccctttttttttttttttttttaataaagcaattttattcttgcagaccacagcatgcttagaaagtcttagaaaataaaaaggagatgaaagcaaacactctgctccagccataatggactccttgtttcttgacattctccatagcctcttggcaatctattccccgggctatatctggagtgttcccctaattttggaaaccgaattacac

SEQ ID NO: 1090 - DNA, 404 bp, Homo sapiens
  misc_feature (1)...(404): n = A,T,C or G
ccgntgtcgacccacgcgtccgagaggatactgcagtacatgaagatgtgtgtctcggaagctcctttacacatggaaggcacaagttgtccccaggggtggccacagcatggggaaatcatatttcaggattatcacatgaaatacagagacaacacacccaccgtgcttcacggcatcaacctgaccatccgcggccacgaagtggtgggcatcgtgggaaggacgggctctgggaagtcctccttgggcatggctctcttccgcctggtggagcccatggcaggccggattctcattgacggcgtggacatttgcagcatcggcctggaggacttgcggtccaagctctcagtgatccctcaagatccagtgctgctctnaggaaccatcagattcaacct

SEQ ID NO: 1091 - DNA, 484 bp, Homo sapiens
  misc_feature (1)...(484): n = A,T,C or G
cgcgtccgaatgatcnaatccatctccccgaagcctacctcaaggaggatattgggggagagcttgtttatgtacttcctccattcagcaccaaagtctcaggggcctacctgtcactcctacgggcactcgacaatggcatgggtgacctcaacatcgggtgctacggcatttcagataccaccgtggaggaggtctttctgaacttgaccaaagagtcacaaaaaaatagtgctatgagtcttgagcacttaacacaaaagaaaattgggaattccaatgccaatggcatctcaactcctgacgatttatctgtgagcagcagcaatttcacagacagagatgacaaaatcctgacaagaggagagaggctggatggctttggactgttgctgaagaagatcatggctatactcatcaagaggttccaccacacccgcaggaactggaaaggtctcattgctcangttatcctccccatcgt

SEQ ID NO: 1092 - DNA, 321 bp, Homo sapiens
  misc_feature (1)...(321): n = A,T,C or G
cgggtggtggccgggctgctgactccggcgctgggtgggctgacgttcgctggccagcccctgggggggagtcttggcgaacgcacccccgagcagttccgacgcatngnagatggtcttccagaacgccgacaccgcgctcaacccgatgcacagcgtcggtaccattctgagccgcccgctgaagatgtatttcggcctcaagggcgccgcattgcgcgagcgtatcggcgaactgctggacctggtgcggttgccgcggaccatggccgaacggcgtccgaatgaactctccggcgggcaaaagcaacggggtcaacc

SEQ ID NO: 1093 - DNA, 431 bp, Homo sapiens
  misc_feature (1)...(431): n = A,T,C or G
ccacccgactccggtgaaggcccgcctgcccctgaccaccaatganaaggctgacactgacatggagggcagtgtggacaccangcaggaaaagaagaatggcagccagggcagcagagtcggcactcctcagctgctggccctggtacagcactgggtgcccggggcacggctggtggaggagctgccacacgagctggtgctggtgctgccctacacgggtgcccatgacggcagcttcgccacactcttccgagagctagacacgcggntggcggagctgaggctcactggctacgggatctccgacaccagcctcgaggagatcttcctgaaggtggtggaggagtgtgctgcggacacagatatggaggatggcagctgcgggcagcacctatgcacaggcattgctggcctanacgtaaccctgc

SEQ ID NO: 1094 - DNA, 1033 bp, Homo sapiens
  misc_feature (1)...(1033): n = A,T,C or G
ttttctatttttttttcatggaaaaatgggggtaacttagcagtttcaatatttgaagactgaagtttaaaaaaaatttaaattcaaggtactccaaaatgtggtccaggattcaagcatcggattgttctgtgcaagagcagtgacctttctaagacattcccagctgcacaatgtccagaggaaagcaaacctcctgtccgcatccgctgcagtttgggccgctgccctcctcctcgctgggtaacaggagactggggccagtgttctgctcagtgtggccttggacagcagatgagaactgtgcagtgtctctcctacaccggacaggcatctagtgactgtctagaaactgttcggcctccatcaatgcagcagtgtgaaagcaaatgtgacagtacccccatttctaatactgaagagtgcaaagatgtgaataaagtggcttattgcccacccgtgctgaagttcaagttctgcagtcgagcatacttcagacagatgtgttgtaagacctgccaaggacactgacccacagaaagccagagagagtgccttgtcatttcatcatggaaatgcatccatcaaagagagccacccagaggaagaggattgatgtccttgcaaatgcattaccctgtggaaaacgtaaccactggtcagccctagctgacaaaatttcaatattattttagcttctgtgaagtgggatttattgatccaaagtgctggacacggtattaggagggaatgccagattggagagatccaaacaacacagggagacttgcttactgtggagcgtttgtgttctttcgagtaaatccaatagcctgtttacctccttggaccattaagataatttttattatggacttagcaatgacactgaatccatttgtatttaaaactgtttaaaatgtaagctgttatgacttggtcaactatngaagtgaaagaaggttcaaaattctttaaagtcatagcttaaaaaaatttactgtacttttatctcactacaacagcaccacaa

SEQ ID NO: 1095 - DNA, 437 bp, Homo sapiens
  misc_feature (1)...(437): n = A,T,C or G
acncgtccgcagccccctgcccagcccagctacacttgggccatcgtgcgctctgagtgctccgtgtcctgcggagggggacagatgaccgtgagagagggctgctacagagacctgaagtttcaagtaaatatgtccttctgcaatcccaagacacgacctgtcacggggctggtgccttgcaaagtatctgcctgtcctcccagctggtccgtggggaactggagtgcctgcagtcggacgtgtggcgggggtgcccaagagccgncccgtgcagtgcacacggcgggtgcactatgactcggagccagtcccggncagcctgtgccctcagcctgctccctccagcaggcaggcctgcaactcttanaagctgnccacctgcatggagccgccnggccctggcanaantgcttaacacaccttgtgggaanggg

SEQ ID NO: 1096 - DNA, 479 bp, Homo sapiens
  misc_feature (1)...(479): n = A,T,C or G
aatgtggctactgaaacctaatgggaatgaaaatagaactttaccctcttctcaagtgttccaagacctgtggacgaggggtgaggaagcgtgaactcctctgcaagggctctgccgcagaaaccctccccgagagccagtgtaccagtctccccagacctgagctgcaagagggctgtgtgcttggacgatgccccaagaacagccggctacagtgggtcgcttcttcgtggagcgaggtatggattagaaagtcactgntgggtcaaggagattgattaaaatccagacaaacacaagtgaagccaatgtcctaaactaaaaaaaaaaaaagattacccaaagcaaggaaaccaaacctctacactnaagatacactcaaccaacctnattcaccagcccatccaagtgtacaacatggtagctggatggtattcattgccgtggcaagcagtgcacagtcacctgtggggaagggg

SEQ ID NO: 1097 - DNA, 683 bp, Homo sapiens
tggtttcaggttcaaggggaaggtgtgggaaggttttttctcttagactagtctaagcgggccgcgctgcttgaattccattgcccacagctcgtagaacaggaggtccacctcggaccatggagaccagccatcgtccgcagagtcgctggctgcaggggaaacagaggttcatcaggtacatgatgattaggacaagctgttctttagagggctctgttcagggccctcccacttgccagagggtgaaaagcaatatatttatttctttttggctttactgaggtataattgacaaatattatatacatttaaggtgtataatgtgatgttttgatatacacatatattgtgattaccaccgtcaagctaattaacacatctccatcattttacagttactttttttggtgatgacttaagatctactctcttagcaaattttaagcatacaatccagtattattaactatggtcaccatggtgtacatgagctctctagaacataatatgagccggcacaaagttgcagttatacaggatgaaaagcaacatatttcttaggccaacggcccaggggtttatcccaggtcatgatgtgtacagcagtggggtaatcggatgctttgcctggctcagtacagctgagccttcccacagtgtatgctctcctattcattgat

SEQ ID NO: 1098 - DNA, 473 bp, Homo sapiens
  misc_feature (1)...(473): n = A,T,C or G
gtccggttnaggagagaggagtgttctgtccaggaggcctctgtgattggacaaaaagacccacatccaccatgtcttgcaatgagcacctgtgctgncactgggccactgggaactgggacctgtgttccacttcctgtggaggtggctttcagaagaggattgtccaatgtgtgccctcagagggcaataaaactgaagaccaagaccaatgtctatgtgatcacaaacccagacctccagaattcaaaaaatgcaaccagcaggcctgcaagaaaagtgccgatttactttgcactaaggacaaactgtcagccagtttctgccagacactgaaagccatgaagaaatgttctgtgcccaccgtgagggctgagtgctgcttcttcgtgtccccagacacacatcacacacacccaaaggcaaagaaggcaacggttgctccaaaagtcaaaagaactctaagcccaaaa

SEQ ID NO: 1099 - DNA, 1127 bp, Homo sapiens
ccccgcgtccgcaagagcggaggcctgggtgagcgcggcccgcgacggcacgggctaggacagacggacgcagacggcccgacgacctgggcgttcgggcggagcgtcggaaaggccagacgcctggaaggggaaactgaagcagaaagaggttacttaatgggctcaaggtcacctacctgacctaccagcagctcaatggccttcccaaagaagaaacttcagggtcttgtggctgcaaccatcacgccaatgactgagaatggagaaatcaacttttcagtaattggtcagtatgtggattatcttgtgaaagaacagggagtgaagaacatttttgtgaatggcacaacaggagaaggcctgtccctgagcgtctcagagcgtcgccaggttgcagaggagtgggtgacaaaagggaaggacaagctggatcaggtgataattcacgtaggagcactgagcttgaaggagtcacaggaactggcccaacatgcagcagaaataggagctgatggcatcgctgtcattgcaccgttcttcctcaagccatggaccaaagatatcctgattaatttcctaaaggaagtggctgctgccgcccctgccctgccattttattactatcacattcctgccttgacaggggtaaagattcgtgctgaggagttgttggatgggattctggataagatccccaccttccaagggctgaaattcagtgatacagatctcttagacttcgggcaatgtgttgatcagaatcgccagcaacagtttgctttcctttttggggtggatgagcaactgttgagtgctctggtgatgggagcaactggagcagtgggcagtacctataactacctgggaaaaaagacaaaccagattgttggaggcttttgaacaaaaggacttctctttagccctgaactatcagttttgtatccagagatttatcaactttgttgtcaaactagaaaactcaaaactcaaagtttcaaagaaccaaaggactcttcctctgggcaccacaaacttccccttcctccactgagaagactgtctctcccgcagaccctgaattattgaaatcgaaggctgacttcctttctgcagtgagccagggg

SEQ ID NO: 1100 - DNA, 1923 bp, Homo sapiens
ttttcttttagaaaaatagttctttgtttattggatacccaagaattaattttagaatttaaatttggctttagtatcagtaagtacggatatcacatcctcagaaccaaaaacgaacaactcattttcttctttcaggaaattaaaagctacaaaggcaaaaagagggttgaggatatatgaatataacaacttttaactagctgactaattaaagagaggattagcaaagataattgaagtctacttataatttcaaatttccattttgaaaaagttttatttttaattcaaagagattaaaataaggagcaaaactgatatgaatttcaaatactctttctctgccaatgatcaaaacaattagagatgaaatgaaaacaaaatcttaggtaattaacagactggatagtcaagtttaaaatcagtaagggttaactgtcaatatactttgatatcagaaagcttatatcaaggtttgttagaagggagattaaacagttgttgatacattacacagaaagaaaagagtaaaaggaggtatggagagaaagttctgagtcctttgggtcctccccaaatcttctatcactaaacaaaagtcactagttgcaagtgtgacaggataataacattagcccctgggctcactgcagaaaggaagtcagccttcgatttcaataattcagggtcctgcgggagagacagtcttctcagtggaggaaggggaagtttgtggtgcccagaggaagagtcctttggttctttgaaactttgagttttgagttttctgtatagaaaaaagtggagacttaaattcatctttggggaagactttttcctttgttatgagaaagccgcccctttaccttagttataggaactgaaacaagtcctcacctgaccccagtgtttttaaagagccgaaaagtggtgacatcgaaatgaattcaaaagcatcccattctagagttagactgagcagccaaatgagctggtgtattttgagttgtatacagttgagacatgttacagtttggtattaaagtgcctgcctaaatgcagtagctcagagttttcctagattccaaatgaatatttattaaaatgaagacatattatagtggtttaaaattagacaactttaaaataggattaggaaccagagaccgagataatgagagctcctaaagacagatggaattaatcaattacaattttcctcttgattccatttcatccatataaacagaaatttctccacaaaaaaatctgtgaaatgaatgactgagagttgtgactcctagagtttttgccccttcacaaaataagactttttaaggctcacaaaaggtacctcaatgcttattgtgagatttcatttgctaggagagtttattcaagttcatctaaaattccctgagaaaaaaatgcactatttaaggtagattatgtctcaaggtgcaaaccctgatttgatagagaggcactagctaccagcttccaagtttccatcctttaaatcagtgaaagaaaggaaatccaggctcttcagtttagcttcagcactatcagtaaactccctggaggctttctgcagtggaagccggggtgggcccattggaatcccagagaccagagtcatgatggctttggtctgtgacactccaaaacctagtttgacaacaaagttgataaatctctggatacaaaactgatagttcagggctaaagagaagtcccttttgttcaaaagcccccaacatctggtttgtcttttttcccaggtagttataggtactgcccactgctccagttgctcccatcaccagagcactcaacagttgctcatccaccccaaaaaggaaagcaaactgttgctggcgattctgatcaacacattgcccgaagtctaagagatct

SEQ ID NO: 1101 - DNA, 179 bp, Homo sapiens
  misc_feature (1)...(179): n = A,T,C or G
ccgcgtccgntagacccctgntctggaggtggagncnctaacgntatcacagacactctggttgcaggnaccatctcanagggggcccnccactnagntctccncaccaagaatgccttgnatcctatgtctgngctgctagcccgctccttggaagntagacatatgaagaatnggat

SEQ ID NO: 1102 - DNA, 318 bp, Homo sapiens
  misc_feature (1)...(318): n = A,T,C or G
tnccgacaaggcagaccaaggccccctgcangtcccctatncgcaccccggcccntgagagctggcactgcgactcgagacaggggcccggcangacagctncagaatgaaaatgcggntcttggggttggtggactgtttggttttctggcccntgcattctgaggggtctggngggaaactgncagctgtggatnctgaaacaaacatgaatgtgantgaaattatctcttactggggataccctagtgnggaatcctnnttgagacagaaganggntatntgtnttgtgccttaactcgaatncctcatgggagg

SEQ ID NO: 1103 - DNA, 321 bp, Homo sapiens
  misc_feature (1)...(321): n = A,T,C or G
cgcgtccggccnganttgcctggttntgattntcnaggctgnngtggntgtgnaatgnaaacgccagnacataatggnaacaggacctgaanaccnttncagcatgccnnaggaaagnnnccccangcgnaccccgcanagcattcnctaccaggaccttcctnatctggncaatgcagacaggacagtacctattntgcctgtactgnaaacccacatggcacacccaaggccctcatatttgtgtcccatgganccggagagcacagtgtncgctatgaaagagctggctcggacgctgatggggctggacctgctggt

SEQ ID NO: 1104 - DNA, 489 bp, Homo sapiens
  misc_feature (1)...(489): n = A,T,C or G
tatagggagtcgacccacgcgtccgccagcctgaccatgggccgccgagccctcctgctcctgcttctgtcttttctggcgccctgggccaccatagccctccggccggccttaagggccctcggcagcctacacttgccaaccaaccccacatccctcccggctgtagccaagaactattcggttctctacttccaacagaaggttgatcatttttggatttaatactgtgaaaacttttaatcagcggtacctaatagctgataaatactggaagaaaaatggnggatcaatacttttctacactggtaaatgaaggggacattatntggttttgtaatancacggggttcatgtgggatgtggctgaggaactgaaagctatgttggtgtntgctgaacatcgatnctatggagagtctctcccctttggngacnactcattcaaggattccagacacttgaatttcctgacatcagaacaagctc

SEQ ID NO: 1105 - DNA, 259 bp, Homo sapiens
ccgcgtccgcggacgcgtgggctgggattcactgtattttatgaacaacttccttcatctctggagtggattttgaatatttgtagcccttttgcctttactactggaatgattcagattatcaaactggattataacttgaatggtgtaatttttcctgacccttcaggagactcatatacaatgatagcaactttttctatgttgcttttggatggtctcatctacttgctattggcattatactttgacaaaattt

SEQ ID NO: 1106 - DNA, 387 bp, Homo sapiens
tcactatagggattcgacccacgcgtccgcttttacatatttctgccaggtgtgtgatgaacatcaatgtagttcattaaagcagcagactggttatttatgtttgtaactatccacatcccttagtccagattacatttgtagacataatctagaattgttacaaataaaggttttgtttgaatagttccttgcataatccacatatttcttaagccacaaactttgtatctttgctgtctcctaattagaacagagctcggtcccagctacggatttccggactctccccttctgcttactggtttgggcaggcgctggtggatgtttccctgtacttcttggtcttcgtttttataaatttaatgagcctacatttcaaacttc

SEQ ID NO: 1107 - DNA, 435 bp, Homo sapiens
  misc_feature (1)...(435): n = A,T,C or G
tcacggaacagatggcaacgctctggcggcaggccgatagcnaatgtggcaccttcttctaccaacaccacntngttctggcggtacaccaggttttgacganggggaagggatctggatatggatttgagaattcgnttgcccgaagttgctcgacngacctgaactttnaccctnaagggatgacntttcnncgattattcactccggnangnagaatttttccccgggccgaaanaccccangcgaacaatantttgggctancaaacnctngggaccaatcaccgggctcttttcaaacctggggccccccccncaatttccnnntggactgaaattttgngcantnttgngncaagnncntttccaacccttggcaanctnttgaattccgaatatgnccnggnggggcngggtctcaactttttttaac

SEQ ID NO: 1108 - DNA, 189 bp, Homo sapiens
cccttgggcgtgggcacgcgtattcaagttgatgctgggcgaagtagcccgagtttgatccctttcgccagaccaatttcaccgctgactggcgcaagttcaccggctaacagtttgattaatgtcgatttacccgcgccattgcggcctaacagaccaatacccgcgcccacgcccaggcgtaaaggg

SEQ ID NO: 1109 - DNA, 505 bp, Homo sapiens
  misc_feature (1)...(505): n = A,T,C or G
gcgtncgctggtcgacagatcaggaaaattagggcagaagttttttcatgctattctacgacaggaaataggatggtttgacatcaatgacaccactgaactcnntacgnggctaacagagtaggtacattgttaatgtcacactttcatatagaaattaattactgtgtgaaaatatgtcaaggaaagattttaaatgaaaaatgttactagattgagcatctgatctatattagaaatcgatcatctggcagccatgtctagcagcatctatagcctatgccattgcatgttggctttcccccaaggtgcatagtaggtttatttgaggactgaattcacatcttatacctgtttatttctcatggaactttctactgcaggacgtgacaggtgctagactgtcaagtaaagatggttgaatcaatgaatagatgattgaattaatttacaaagagacttgcttttagtaattgtcactcttcacttattcaacaaatatttg

SEQ ID NO: 1110 - DNA, 499 bp, Homo sapiens
  misc_feature (1)...(499): n = A,T,C or G
ccctttcgagcggccgcccgggcaggtacattttgaatatcaatttctaaatatttacccaaaaatgtatatttaaagtttttaacaacttcttttcaatcttgaaaaagttccctcattttttcttttaaaatcccattaacaatcaatggttcttttaaaatagaataaatatttttttgtccatttaaagaagaatatggatcttggaaaatcatttgaatattttttcttaaaaatagattttgtttttttgttaatttgtttccagaaataacttcatctaataaagtaacttgaccaccgtaagattcatataatctaatcaaagatctaccaactggttgttttaccctggatccagattcaccaattaaacctaaaatttttccttgttggatctaaaattttaccgttatcaacagctttgacaacccaaanttattggaaaaatatttttttaagctttgaacttttaagggtgggttaacttgcatta

SEQ ID NO: 1111 - DNA, 676 bp, Homo sapiens
  misc_feature (1)...(676): n = A,T,C or G
gagtcgaccccgcgtccggtcaaatagttaaagcaaattctagatacatggtagagaccaggagaaaatatgaataactttcttctaaacaaggagctcagtggataaaccatacctctagattccttgcttccattttcccagaaacaagatgaggaatnagaaagatcagtgtgtagtcaacaaacttgggccttattattgcaagaactttcttaaaaaatggagaatgaaaagagagtccttaatggaatggctgaattcattgctcctactactttgtttagtatatattatcctcattagtcatcaagtaaaatgattttttcttcactgcttaacacataccacncacgggtacatacatataataaaaccataatttaattccaatacacacctgtcaccaacaacaccaaacatacaaccaacaaactaccccaaaaacacaaactgaaatntaaagaagtcccnctactcccataccaggaaaatattaaaaaaatcacatcaaattacccccaagaaaaagtaagagtcacctttactaatacatactcatatcatttgaagttcttgctaggaccatggaatgccagccaaggaaggagcctcaaggaccatacnagcttattgttntgaaacaaatgaaanatgtttactgggaaagttttca

SEQ ID NO: 1112 - DNA, 262 bp, Homo sapiens
  misc_feature (1)...(262): n = A,T,C or G
ncaaaattcccaantttntntgccctgnntgncctgncaaaaccccnacatnctnttcntgnatnaacccaccaatnacntgnatntcnanaccatcnacnccntggcanatgccatnaatnantttnagggtggtntnatgctgggngccatnanttcaaactcattcagcaggtngcacaggaaatttgggtntgtnanaagcaaacaatcaccaagnggcctgganacatcctggnttacaaggagcacctnaagtcca

SEQ ID NO: 1113 - DNA, 506 bp, Homo sapiens
  misc_feature (1)...(506): n = A,T,C or G
cccttagagagtgtcctttntctatgagggtgttgtaatccatgtcgttgttgcatttttaagggcaacacctcancctgcaggcaggcactgaaagataccaaagggtagttcaagaatacacggtcacctggaaaagggggccattttactttttacccgcccgctggcggtgcaaagttcacaaagttgtcttacgaaggttgtaaggtaaaacttatcgattttgataatggaaaccgcattaacccgaatcggcaaaaaattggttaccttacatctcatcgaaaacaacggaggaagtatagatgtctttgattaacaccaaaattaaaccttttaaaaaccaggcattcaaaaaccgcgaattcatcgaaatcacccaaaaagatacccgaaggccgctggagcgtcttcttnttctaccccggctgactttacttttcgtatgccccacccgaactgggtgaccgttgcttgccnccccccacctatnaaagaaaaaa

SEQ ID NO: 1114 - DNA, 493 bp, Homo sapiens
gtccggcacctgagtgtcaacgaccttccggtgggccgcagtgtggaagaaacactccgtttggtaaaggcgttccagtttgtagagacccatggagaagtctgcccagccaactggacaccagagtcccctacgatcaagccaagtccaacagcttccaaagagtactttgagaaggtccatcagtaggccatcctatgtctgcaattacctgaagcttttcaggccaaaaaagagccccagctggaatccttccaatgccttgaagattatttatagaatggcaaaacctcattatgtttgtgtttataagtactgctccacaggctttgtaattttaagacaggttcaggctctctaaaggtggctagctgcttccatagctgcccttactagggacttcttggtggctaaccaattctccccgagtgctttgcccccatttctttggatcatgtccttagagggtaagcattctttcccttaacctgcc

SEQ ID NO: 1115 - DNA, 263 bp, Homo sapiens
  misc_feature (1)...(263): n = A,T,C or G
ncgcgtccggtcggtggttggtttctgcgacttgngttgggactgctgatnggaagatgtnttcaggaaatgctaaaattgggcnccctgcccncnacttcaaagccacagctgttntgccagatggtcagtttaaagatatnangcctgnctgactacaaaggaaantatgttgngttcttcttttaccctntngacttcacctttgtgtgcccnacngagatcattgctttnagngntagggcaaaagaatttaagaaact

SEQ ID NO: 1116 - DNA, 334 bp, Homo sapiens
  misc_feature (1)...(334): n = A,T,C or G
tgttattcataatctgccaataatatgccaanatggctgccgacagcaaggccagtggacggtatgggcttnttcaaggaacctcaggtgaaacctctgggggattactgatttntctgccaanataacaggcggctcgctttngttctgaaatcaaatcctccaagtacggngagggtcaccaagcgnggatcanctggcnttgtggaaaagggaaaccnancggcccggatcattgacaagccnctatttattgaantcctgcctngcngggccacagctgctgttcttgctcctgacantncaaatgcctcctctgagcctatctcgtgag

SEQ ID NO: 1117 - DNA, 261 bp, Homo sapiens
  misc_feature (1)...(261): n = A,T,C or G
ttcttttatttatttagcaagaaattactctttattgatcaaatcaccaggaatctgccgcaaaagacttaacatcttaatgaccactgaggcctgggctctgaggcttgctctgcctctcccagtccttaatggggtttagagggagagacgtcattaacaganaccaagtcagatggntgcaggncctcctttcccagtcatcanacaagttgctcaattcttgnccanagcaggaaagagccagtncttcagtaaaat

SEQ ID NO: 1118 - DNA, 469 bp, Homo sapiens
  misc_feature (1)...(469): n = A,T,C or G
gtcgaccccgcgtccgggccagcagcccttcgggggcgcccgggcctcaggaaccaatgacaatgccaggaggtccccactacatcttacgctggacatcaccccaggtcatcaaggagactcataagcccctgggggactggcgatactcctacatgcagtgagcccaggccagcacctctgttgtcaagcagatgtccatccagatgactgacatctctgcactgaccccctgctccccaccagcttcttctggactctctacagctgagctggaccctgtcctggccactgggtgcctgtcctcggagtcaggtgcccaggcttcgggtcatattggggnaggatcagcccagtccacccagaattctcattcgctgcggaacgccctggtacctggcaggttccccngcctgtctgcttttctcttctcatcctgggcctggtgactcagagggcctcagaacct

SEQ ID NO: 1119 - DNA, 119 bp, Homo sapiens
  misc_feature (1)...(119): n = A,T,C or G
caagaaacggcccgngggagaccccttcgatgtcnaaacagaacaggggccttagattgatcaaaagcagttcgacaaaatcttagagctgatcgagagtgggaagaaggaaggggcca

SEQ ID NO: 1120 - DNA, 276 bp, Homo sapiens
  misc_feature (1)...(276): n = A,T,C or G
aaacggtccgtgggagaccccttcgatgtcaaaacagaacaggggcctaagattgatcaaaaggggtngngacanaaancttaaagctgatccgagagtggtcaagaaggaangggccaagctggaatgcnggggctcatccatggaanacaaggggctcttcatcaaacccactgtcttctcanaagtcacagacaacatnctggattgccaaagaggagatttncggnccagttcaaccaatactgaagttcaaaagtatttgaagaantgata

SEQ ID NO: 1121 - DNA, 259 bp, Homo sapiens
  misc_feature (1)...(259): n = A,T,C or G
ggnggcnggggagcggcccccgggcaggcaccnccngggctcnncaangnggngcagggaggggcngccacaggccagnnncngngncagcancccgangnggccaaagncnccnncacnggaagngngcccacnggcangaagancanggtntttnnttgggnaaggaancaaaccngnnaccnnggaacgnggaggcaaaccnccacggnaggagcgncncanacngngagaggaacaangcngnaaagggggcgcn

SEQ ID NO: 1122 - DNA, 396 bp, Homo sapiens
tatagggagtcgacctggaccgactggcaccattgcaccggcatacccagttcggcagtgatcaacgcggccatttcaccggcgcgggccttgagttgccggcccagtgcgcggatatagccggcacgttcactggccggggttcgtgaccagttggagaaagcccggcgtgcggcggtgacggcgctgttcgacgtcacgttcatcgccgaggggaacttgcccggtcacggtttcagtggccgggttgatgacttcggcgacgccgctgccatgggggacgacccagtcgccgttgatataaagatgggtgtaggtggtcattgttattgttttccatcatcagggaaggacgaggttttccggtggagtttcgacggacttgagggcctcttc

SEQ ID NO: 1123 - DNA, 138 bp, Homo sapiens
  misc_feature (1)...(138): n = A,T,C or G
ccccgcgtccgatgaggaagcctggcnggatggagggcgaggcctggcagcctgtagtgcttctgggcagnagangcnccnggcccctttgtagcacggagctccttccccaaanacatgaagctataggagaactaa

SEQ ID NO: 1124 - DNA, 206 bp, Homo sapiens
  misc_feature (1)...(206): n = A,T,C or G
gagtcgaccccgcgtccgatgaggaacgcctggccggatggagggcgaggcctggcagctgtagtgcttctgggcagtagaggcgcggngtgcggagctagggcggccgagagccatggcggcnctattggcggcggcggcagtgcgagcccggatcctgcaggtttnttccaaggtgaaatccagtcccacctggtattcagcat

SEQ ID NO: 1125 - DNA, 487 bp, Homo sapiens
  misc_feature (1)...(487): n = A,T,C or G
tcncacccagaaagcgcgcctgggcgaggttcgcgcccaactcaaggccagcctgccggactatatgcaaccgaccttctgggtactactaccccggttgcccctgacccccaacggcaaactcgaccgcaaggccctgcctgcgccagaccccgcccaggcacacagcgactacgtggccccggcgacgccactgcaaagccaacttgccggcatctggcaggaagtgctgaaagtcgagcgcgtcggcctgcatgacaacttcttcgagctgggcggtcactcgctgctggctactcaggtggtggtgcgggtgcgcgagcagttgggggtggagttacccgttcgcgagctgttcagcgcggaccacttgctggacctcgccgaaaaggtactggcccttgaaagtcggccgccaacccactgcaggacgaactcgcccggaccctggcgctgctcaagagcctgtccagcgacgatattgaag

SEQ ID NO: 1126 - DNA, 487 bp, Homo sapiens; identical to SEQ ID NO: 1125
  misc_feature (1)...(487): n = A,T,C or G

SEQ ID NO: 1127 - DNA, 425 bp, Homo sapiens
  misc_feature (1)...(425): n = A,T,C or G
tactttggttcaagagcaagacaggaggcgactgcatgagaccatggctgagacacctagtcctccaggcactgnggaactccagggcattctgtgggtctcatgggaagccagcacctctacctgttcctcagaagatcgtggccacctgggaagccatcagcctgggaaggcagctggtgcctgagtacttcaacttcgcccatgatgtgctggatgtgtggagtcggctggaagaggctggacaccgccccccaaatcctgccttctggtgggtcaatggcacaggagcagagatcaagtggagctttgaggagctggggaagcagtccaggaaggcagccaatgtgctggggggtgcatgcggcctgcaacctggggacagaatgatgctggtactcccacggctcccggaatggtggctg

SEQ ID NO: 1128 - DNA, 576 bp, Homo sapiens
  misc_feature (1)...(576): n = A,T,C or G
ctatagggagtcgcccacgcgtccggtaatagangacgtttgtgcatttgcaaacagttaattgttcttatgtcattggatttgttgtgccaaatcaaaaggaaccaacagaactaacttgaaagaaaggacttacaggaacttgagagtagctctctaacagttgtgaaacagaagatgaggtgcagtagtccccctttatgtgaggtttcgctttcttgggttatacctacagtcaaccgtggtccaaaaatgttaagatattttgagagagagagagagcacattaacataacttttattatagtatgttataattgttttattattgttgttgttaatctcttactgtgcctaatttataaactttatcataggcttgtatgtataggaaataaacattgtatagggtttcaggttccaagactgggggtcttggaacatatcccttgaggataagaggggactaccatacgtaaagtactttctgaagctgctatttgggcgtgtctgaaaaaagttttgaaaatctattaaaaattggtttgagccctgacccatgnatcctgaaactgg

SEQ ID NO: 1129 - DNA, 285 bp, Homo sapiens
  misc_feature (1)...(285): n = A,T,C or G
cccgacccacgcgtncggncgtcgcggngcaagggagtgggctgcaantgacagcacggcggctgatcttccacaaagtacagncgtgcctgggcggaagagtccggctgnnggngacgggagccgccccggtgtntgccactgtgctgacnttcctcagagcagtccttggnctgtcagttntatgaaggatnccgacagacncantnnactgccggntgctngctgaccantncnnnnagactggaccncangccntgtngnnnccccgatgccgggcaattt

SEQ ID NO: 1130 - DNA, 409 bp, Homo sapiens
  misc_feature (1)...(409): n = A,T,C or G
taggganccgacccacgcgttgntcgggcacaaccacagccgagcctgggcggaagagnccggctgatnntnacaggagccgaaancccgtctgccactgagctgacgnncctcagagcagtnctgggctgncagggntatgaaggatacaggacagacagagngcactgccgggagctgcctgaccatgcctggagactggaccgcaggccatgnnggggccccgatgcttttgcnngngganaaaactcgnngangnggaagaaaagaaanacanggctgccgagggcgagggcgaggagngtgngaaagggccaaanggatnncagggctactngaaggacccagcgaaaacagcagaagctnnggacaaagacggcnggnnacacacaggggacannggaaaaag

SEQ ID NO: 1131 - DNA, 356 bp, Homo sapiens
  misc_feature (1)...(356): n = A,T,C or G
tctcttantggttggccatgaaantttcatctatttccacgacagagttggagatacattccggtggaaaggggaaaatgngnccaccactgaagttgctgatacaggtggactggntgattttgtccaagaagnaaatgtttatggagngcatgtnccagancatgagggtcgcattggcatggnctccatcaaaatgaaagaaaaccatgaatttgatngaaagaaactntttcagcnnattgntgattacctacctagntatgcaaggccncggtttntaagaatacaggacaccattgagatcactggaacttttaaacaccgnaaaatgaccctggtggnggagggcttta

SEQ ID NO: 1132 - DNA, 392 bp, Homo sapiens
  misc_feature (1)...(392): n = A,T,C or G
accaccctgcattaccanaaagtnctgtcattggctacccccactacatcaaaggacaagctgcctttgccttcattgtggtgaaagatantgcngntgactcacatgtctgtggtgcaggagctcaagtccatggtggccaccaagatcgccaaatatcctttgcctgataanatcctggtggtaaaacctcttccaaaaaccanntctgggaaggtcatgctgcagctcctgaggaanatcatcactagtgaggcccaaganctgggagacactaccaccttggaggaccccagcatcatcncagagatcctgatgtntaccanaaagtgcaaggacaagcaggctgctgctaagtgagctggcaccttgtggggctcttgggatgggcg

SEQ ID NO: 1133 - DNA, 366 bp, Homo sapiens
  misc_feature (1)...(366): n = A,T,C or G
gcatttggatcgacccccgtcttctgacgcgtgggggcacnaacgccggggagagcnttcngggtcccacggtccacntatgggttcgancnancatctgacntctacctgcatcatgtccccngttctncaggcaccangagccacgannactangtggatataaaggaggtggagcnnaattagtnatagccccagaancagnncatnaacgcngcgtcnggggcggccatgtccctgcacgggatccaganaaatggtctggtgaagatcaangtgcgcggantacgacgcggaatgcggtagacncggctnnntncacgggcctgtccatacgaggacctgctnaacgtggcaagctccccc

SEQ ID NO: 1134 - DNA, 270 bp, Homo sapiens
  misc_feature (1)...(270): n = A,T,C or G
cgcgtccggctgctcactgttggggctcgtatttatgtggangctgtanntaatcatatgtgtggnantgctgcnagtgcangaacaagcagtaccngtgganagttacttnaaccctggaagtanggactttcagcaccnccatattctggatgggattncnatgnnggtannngtanaactgcnagnggcagatntnnagaactataatgatgctcctcangtcagagatctnattctgtctggtcttctcctcttgcactggggaag

SEQ ID NO: 1135 - DNA, 161 bp, Homo sapiens
  misc_feature (1)...(161): n = A,T,C or G
gaccncgcgtccggangcancaatgttggggttcgtatttatgnggatgctgtaatnaatcatatgtgtggnaatgctgtgagtgcangaacanncnntncctgtggnagttnctncaaccctgnaagtatggactntccagcagtcccatattctgnatg

SEQ ID NO: 1136 - DNA, 310 bp, Homo sapiens
  misc_feature (1)...(310): n = A,T,C or G
gcgagctaccggcgcagaagtggtggcacacgggcgccctctaccgcatcggcgaccttcaanccttccatggccacngcgcgggcaacctggcgggtctnaaggggccgtctcaattacctnanctctctnaangtnaagggccttntgctgggtccaattcacaanaaccanaangatnatntccctcanactnacttgctnngggatcgaccccaattttggctccaaaggaaaatttngacaatctctttccaatccnctaaaaaaaaaaacatcccttttcatttctngaccttactcccaacta

SEQ ID NO: 1137 - DNA, 1504 bp, Homo sapiens
  misc_feature (1)...(1504): n = A,T,C or G
caccacgcgtccgttcagtaaccatcaccaccggctacagctgaaggcagctccggcctcctccaatccccccggcgccccggctctgccgctgcacaattcctccgtgactgccaactcccagtccccggcccttctggccggcaccaaccccgttgctgtcgtcgcggatggaggcagttgccccgcacactacccggtgcacgagtgcgtcttcaagggggatgtgaggagactctcctctctcatccgcacgcacaatatcgggcagaaagataatcacggaaatactcctttacaccttgctgtgatgttaggaaataaagaatgtgcccatttacttttggctcacaatgctccagtcaaggtgaaaaatgctcagggatggagccctctggcggaagccatcagctatggagataggcagatgattacagctcttttgaggaagcttaagcagcaatccagggaaagtgttgaagaaaaacgacctcgattattaaaagccctgaaagagctaggtgacttttatctagaacttcactgggattttcaaagctgggtgcctttactttcccgaattctgccttccgatgcatgtaaaatatacaaacaaggtatcaatatcaggcttgacacaactctcatagactttactgacatgaagtgccaacgaggggatctaagcttcattttcaatggggatgcggcgccctctgaatcttttgtagtattagacaatgaacaaaaagtttatcagcgaatacatcatgaggaatcagagatggaaacagaagaagaggtggatattttaatgagcagtgatatttactctgcaactttatcaacaaaatcaatttctttcacgcgtgcccagacaggatggctttttcgggaagataaaacagaaagagtaggaaactttttggcanacttttacctgntgaatggacttgttttagaatcaangaaaanaaaaaaacatctcantaaaaagaaaacccctcgaaataagcccatcatanagantttnantaaanntnnaaannnnnnnnnnnnnnnnnnnnnnnnnnnnnnnnnnnnnnnnnnnnnnnnnnnnnnnnnnnnnnnnnnnnnnnnnnnnnnnnnnnnnnnnnnnnnnnnnnnnnnnnnnnnnnnnnnnnnnnnnnnnnnnnnnnnnnnnnnnnnnnnnnnnnnnnnnnnnnnnnnnnnnnnnnnnnnnnnnnnnnnnnnnnnnnnnnnnnnnnnnnnnnnnnnnnnnnnnnnnnnnnnnnnnnnnnnnnnnnnnnnnnnnnnnnnnnnnnnnnnnnnnnnnnnnnnnnnnnnnnnnnnnnnnnnnnnnnnnnnnnnnnnnnnnnnnnnnnnnnnnnnnnnnnnnnnnnnnnnnnnnnnnnnnnnnnnnnnnnnnnnnnnnnnnnnnnnnnnnnnnnnnnnnnnnnnnnnnnnnnnnnnnnnnnnnnnnnnnnnnnnnnnnnnnnnnnnnnnnnnnnnnnnnnnnnnnnnn

SEQ ID NO: 1138 - DNA, 2985 bp, Homo sapiens
  misc_feature (1)...(2985): n = A,T,C or G
ttttactataaaaacccatttttattagcatgagtggggcttaattccagttctgagcagaaggaaacagtttttcatctactaacatgtatcagcagacagatgtgacagtttccaaaccatcatctgtacttcttatactcacaaaaatcagggcatctacttcatactacccttttatgaagtttggcaattctctgtatgtgaatatctacagagggcaaattgtctcatcagagaattattttctcaaagatggaaaccatatcttctctggataccataccagtgggcaagaatattaaccatttctaaatggctattgaagatgactatacgattgtccccctaccaatttaaacagtttcaaaatcacaaatggagaagaacatatagaattttgtgtacctacattgcaaaatcttgatttttcatgtggtattatgaaaacatatggtgttttgacttattcatttgaaacactgcatatagcttcattcattaactggattaaaaggcacatttcgaaaaattttcattaaaagtaatactgtgaaaagtttatttgcatcgattaattcctttttttcaccatcataagagatattgacatttgtttgctctttgtgatcagagaaaagacattttggaatggataatctgtttctaccattctttaaagaaaaaagctttaaaaacaaaattcaagtgcaaaaatttccagtagtcttcctacctccagtgtaccccagcaaaatattcatagctgtgctgttaggaaattaatcaaccataagcttcaattacccactttttttcttccctaaggtgtctgtacttatgaaaacatatatagcatattcctgaaagtataccatattcctacaaagtaagggagcctagaagcaacagtgatcactgcctttcagtgtctccaaccccatgtaaccactgataggataattcagtctctaagtcatttgatctacccatttcctaaataacagcgatcaacttctattcaacaaagctagtctgggtttactaacacgttcccccaaaattcaataggtccatgtaacgtagtaattaggtctttcaattttttactatgattatttttcttcattataaaatgtatttaatgtcaacatacgcaatgcatgtatcagtatggaagatgcagctttaaagatgtttatttaaaatttttcttacggtttatgctttggatttttaaatcatattttcaataagggtctctaaactcctttcaaattacctaaaatcctgaaaaaagtttaagctactggtcagtctaaaaaacttgacagatgcattcttgagacattcatcaggatacattttaaaaacatcaatctaagtaagctctttaatacaacatgatactttataactgttatacattaatccccctaatttattttcatacttggaccttcaaaccaccttggaataaataagaaaaattttaagtgcaaaaatgagtaatacatgattttatcactttggagacaatgaaatcaatattttcctgtgatttaaaaaaaataataggagtaatcaatcttgtgtatacttctggactttaacttgtaacaaatatattctgttagcatataaaatgtttttatcttattttgaaaggattaaatatgtagggttgtccaaaatatgtgtattgttttttaaaactgacaccaatgcatccatattctactaaaaacaaacaaaataatcagaccgatgtgtacttattaggaagcaagtttaaaaatttggatttttttttaaagtgctgagatttggaagaggaatatctttaaacatgctaaccattaccttatgatgaccataacaaggactcaaactcaagtttagaaaaaaaaaaaatagaggttctatgaaaggaagattagtaacaaacattcaggtaaaaacaaatagcaccacaatgaattgcactaaggtgctaaaggaggtaccttattccctgcagagtgaacgctccttctgaaatgtattgcaacatataaatgcaattgtttaatggttaccatttggttcattcatctacagaaaattgcattccttctagttcattatattgaacaaacattcaaattactgaactatacataatgttacatagtttacattttatgaaaacaaagctcgaaggaatatttataaatgtcaccttgcataaagatgacaagtttaaaagggctccatatctcttaagacatttaatttacgttaatggtccaggagtgttttagatatagatatagatatagatatatttatatgcatatatatttcaacaagaagtgtaaaaatttttaaaaacaaatcacagcactcatagctgcttcacatacgcaggtcttagggtcattaatgtgtcaaactattacatttataatatgtatatttttaaaaagacaaaaaatggcacatcagaaaactcgctgaaattcttattagaggcccatttcactgtatcgtattactgatgtgtcgattcaatgtgtaattcccttttcttcactgaaagcatttgtcccttctatttggatccacttctagggtctctgtattttctttccttggttagacggcatccttttccacgtcagttaaagatcaggaaaacggcttgggtcttccttgtagtcatcaggtatagtaaagatggagccatcaaattcatcgtatcgaaactcctgaaaagtcacagtggctgtgattgtgggaaacacaaggtatatcaaatctaacactaaagccaaaatcaagcctcatctgaacaaattctctaagcttgttaaagtgcttnaagggagctactacttctnaaacatncnataatnctctttgcacaccaattctctanccagatgaggagcttttccattttcagcagatatatattcntcccatgtatagtgttctgaggag

SEQ ID NO: 1139 - DNA, 1998 bp, Homo sapiens
  misc_feature (1)...(1998): n = A,T,C or G
aaaataaataaaaaagatgaaactcctaaacaaatacactctactcaacaataaatgaaacaagttaaagaattaataagtttagggcaaatgtgaatgtgaaagattttgcagttggacaccactgcatgaaccttgcaatgttgaatattaccgatgttgctaagatacttatagcagctggagcagatgttaacacacaaggattagatgatgacactccactccatgattctgctagtagtgggcacagagatatagtaaagctgttacttcgtcacggtggaaatccatttcaagctaataaacatggggagcgtccagtggatgtagcagaaacagaggagttggagttgctactaaaaagagaggtgcctttatctgatgatgatgaaagttacacagattccgaagaggctcaatctgtaaatccttctagtgttgatgaaaatattgactctgaaacagagaaagactctctcatctgtgaaagtaaacagatacttcccagtaaaacacctcttccatctgcccttgatgagtatgagttcaaagatgatgatgatgaagaaattaataagatgattgatgataggcatattcttaggaaagaacaacgaaaagaaaatgaacctgaagcagaaaaaactcatttatttgcaaaacaggagaaagccttctatcctaaatcatttaaaagtaaaaaacaaaagccatctagggtcttatattcaagtactgaaagttctgatgaagaagctcttcagaataaaaagatttctacttcatgttccgtcatccctgaaacatcaaattctgatatgcaaaccaaaaaggaatatgtagtttcaggtgaacacaaacagaaaggcaaagttaaaagaaaattgaaaaatcagaataaaaataaagagaaccaagagctaaagcaagaaaaggaaggaaaagaaaatacaagaataacaaacttgacagtaaatactggactagattgttcagaaaagaccagagaggaggggaactttaggaaatcttttagcccaaaagatgatacttcattacatttatttcatatttccactggtaaatctcccaaacattcttgtggattaagtgaaaaacagtcaacaccactaaaacaagaacatactaaaacatgtttatcaccaggaagttctgaaatgtcattacagcctgatcttgttcggtatgataatacagaatctgaattcttgccagaaagttcaagtgtaaaatcttgtaagcataaggaaaaaagcaaacatcagaaagatttccacttagaatttggtgaaaaatcaaatgccaaaataaaggatgaagatcatagtccaacaatttgaaaattcacgattgcacacctaaaaaaatggataaagaaggtaaaacattaaaaaaacataaattgaagcataaaaaaagggaaannnnnnnnnnnnnnnnnnnnnnnnnnncgcgtccggaaaaatanaaactaaggatagtgccaaagaactgcacgaggagtgtggaatttgatagagaattttggaaagagaatttttttaaaagtgatgaaactgaagatctctttttaaatatggaacatgaatccttaacattagaaaaaaaatcaaaattggaaaaaaacatcaaagatgataaatcaaccaaggaaaagcatgtgtcaaaagagaggaactttaaagaggaacgagacaagattaaaaaggaaagcgagaaatcttttagggaggaaaaaataaaagatctaaaagaagagagagaaaacatacccacagataaagactcagaatttacttctttgggtatgagtgccattgaggaatctatagggcttcatttagtggaaaagggaatagacatttgaaaaaccaagaaaaagcatattaagggaantaaaagaaaaacctgagaagccatctccaattaaagaaaagggcattgcnaagatggaaagnaaaacctttgaaaaaa

SEQ ID NO: 1140 - DNA, 321 bp, Homo sapiens
  misc_feature (1)...(321): n = A,T,C or G
ggaccaccccagtgatccctctgggaagagcttgtcctttaagcaggaccatcagcaggaaacacagcagctccgttctgtgctgtggcggctggcctccaggtatctgcagccccgtgagtggaagaagctggcatattcctgggagttcacggaggcacatgtcgacgccattcgagcaacagtggacaggcaccaggagctatcaggagcacggncaccgaatgctgctcatttngctgcatggcgtggccacgggcttngtgagaacccccagcaaagcgcttgttcgagggnctcgttggccattngcaaggaagg

SEQ ID NO: 1141 - DNA, 641 bp, Homo sapiens
  misc_feature (1)...(641): n = A,T,C or G
ttangcgaaaaggacctaaacaaatccacccctcaaaatcacacaccatccaccattggttcaggcaatcttcagcggtgatccagaggagatccggatgctcatccataaaactgaagatgtgaatactctggattctgagaaacgaacccctcttcatgtggccgcatttctgggagatgcagagatcattgaactcctgattttgtcaggagctcgtgtaaatgccaaggacaacatgtggctgactccactgcaccgggctgttgcttccagaagtgaagaagcagtacaggttttgattaagcactcagctgatgtcaatgcaagggacaagaactggcagacccctcttcatgtggcagcagccaacaaggctgtcaaatgtgcagaagtgatcattcccctgctgagcagtgtcaatgtctccgaccgaggggggcgcacagccttgcaccatgcggctctgaacggccacgtggagatggtcaatttactcttggccaaaggggcaaatatcaatgcatttgacaagaaggaccggcgtgctctgcactgggcagcatacatgggccacttggatgttgtagcattgctcattaaccatggcgcagaagtgacctgtaaggattaagaagggt

SEQ ID NO: 1142 - DNA, 501 bp, Homo sapiens
ctactcgttaccaccaagctgctagtgatagttacctggaacttctaaaagaggctaccaagcgagatctaaatctttcggatgaagacggcatgactcctactctcttggcagcctaccatgggaacttggaagccctagagataatctgcagtagaggaggggaccctgataggtgtgacatctggggaaacactcctctacattttgcagcctccaatggccatgcccactgcgtctcattcctggtcaactttggtgccaacatctttgccctggataatgacttacagactccactggatgctgctgccagcagggagcagaatgaatgtgttgctctcctggacaaggctgccactgcacaagaacatcatgaaccccaagaaggtcaccaggctgaaggagcaggctcagaagaatgccaggaggcagatcaaagagtgtgagaggctccaggagaagcaccaaaataagatggcccacacctacagcaaggag

SEQ ID NO: 1143 - DNA, 268 bp, Homo sapiens
  misc_feature (1)...(268): n = A,T,C or G
gcgatccccccacgagtccagtgagctcagcctccaaggctttaaagccacatttcancaagagaaagcgctgagagctcgcaggttcattaaagaaggcaaagcactggtttctctccttagaaaagtatgtttcttggcttgatgtatactggcttgctttgatttttaagtgaagggaatgtacgtaaaacaaaatagggcttggctggtcaaaggagacaagcaggatggatggatggatggatggatggatgtatggatgaat

SEQ ID NO: 1144 - DNA, 565 bp, Homo sapiens
  misc_feature (1)...(565): n = A,T,C or G
tcttttaacattattggtagctttattaaatttgtttaccttctaaaaaaaacgattacaaaaaagaatacttcatttaagtgtaatactggctttatggacgtaccgtgatcagaaagtgaaattaaagctcatcggatatgcgtgagaagagaatgggcgcagaggcacgagtccagtatcccacggagagaaggaagtgtagagagatgcgtggacccatctcaggggtcacgcattcctgggccaaggagttgcttctaagagcttaaaataaatgcactggctggctccagggctggacacacaggcacagaactcttgtaccgcttctcaaagctgcccaaagctgcgaccttccccctcaaaaacacacaatcaaataaaaccaaccagcatctgtattcctttctccgcaatttacacccaaacaaaacatagggagagctcgcttgcctttgagccgtgggccttggggagtgtgagtggggtgggccagggangaacgggaacagggaggagaccgggacaagggaccggttttctccccggtcttggctgggtc

SEQ ID NO: 1145 - DNA, 517 bp, Homo sapiens
  misc_feature (1)...(517): n = A,T,C or G
gaccccgcgtccggttcctccccgggactccagaatttntctcctcaaaggaaagaaaacagggcatgcgcttgttggcaaaacgcagggccggctcccaaaaaccccatgtgtgtacgattaaaagttggccgttncccaggccttccaagcgcaaaacttaaagangacagggctttgcctgaaaaaaccaaacatggggccagacttggngcttntttaaccaanccccnaagagaccttttcccggntagcntggccntgngaaancnancaaggccntggccgaggcaatanccggagngcctttggcncangaaggaccatcttncaggttnttttcncttttntattggggccccttngttttttttggggctcccccccttaaaaggaaanttcctncnccnaccaantacnattttggtgcnnttcntaccttttggttggnnctnntattttaccnttttggggttgggaggccaanacccaaggnaaaaaagngggggaaaaaggn

SEQ ID NO: 1146 - DNA, 495 bp, Homo sapiens
  misc_feature (1)...(495): n = A,T,C or G
tgcaacaaaaagaggacagctctgacaaaggtatgcagtagccaactatatcagcgtgaggccgtacaatgccaggaagatgaatgtgcgttaatgttgctggaacatggcactgatccaaatattccagatgagtatggaaataccactctacactatgctgtctacantgaagataaattaatggccaaagcactgctcttatacggngctgatatcgaatcaaaaaacaagcatggcctcacaccactgctacttggtatacatgagcaaaaacagcaagtggtgaaatttttaatcaagaaaaaagcgaatttaaatgcgctggatagatatggaagaactgctctcatacttgctggattgttgtggatcagcaagtatagtcagccctctacttgagcaaaaatgttngatgtatcttctcaaagatctgggaaagacggccanagagtatgctggtttctagtcattattcatgtaatttgccagtta

SEQ ID NO: 1147 - DNA, 304 bp, Homo sapiens
  misc_feature (1)...(304): n = A,T,C or G
aacttcaaaaggacactggttacctgctcgtgcccatagtangctgcaatgtgcagtggggtgaagaagacggcatcttgaacattcacgttggccccatgttgcatcagcacttctgcagcctctgggtgtccagctattgcagctatgtggagggctgtgaggccaccgtatcccacttgctgaacatctgctccgctgtgcaacagtgaaagtgataaattccgggctgtccttgtaaaccggcaggtgcaaaagcttggaaacccatttctcgtcagtctggatggacggagccctttta

SEQ ID NO: 1148 - DNA, 186 bp, Homo sapiens
  misc_feature (1)...(186): n = A,T,C or G
aacttcaaaaggacactggttacctgctcgtgcccatagtaggctgcaatgtgcagtggggtgaagaagacggcatcttgaacattcacattggccccatgttgnaccagcactttttgcacctnttgggtgtncaacttattggcactattnttggaaggggctgtgaaggccacccgtatccca

SEQ ID NO: 1149 - DNA, 616 bp, Homo sapiens
gacgagaaatgggtttccagctctgcacctggccgtttacaaggacagcccggaacttatcacttcactgttgcacagcggagcagatgttcagcaagtgggatacggtggcctcacagccctcccatagctgcaatagctggacacccagaggctgcagaagtgctgctgcaacatggggccaacgtgaatgttcaagatgccgtcttcttcaccccactgcacattgcagcctactatgggcacgagcaggtaaccagtgtccttttgaagtttggtgctgatgtcaatgtaagcggtgaagttggggacaggcctctgcacctggcctctgcaaagggcttcttcaacattgtgaaactcctggtagaagaagggagcaaagcagatgtgaacgctcaggacaatgaagaccacgtccctctgcacttctgttctcgatttggacaccacaatatagtgagctacctgctccagagtgacttagaggtccagcctcacgtcattaacatctatggtgacactcctttgcacctggcatgctacaatggaaattttgaagttgccaaggaaattgtccaggtaacaggaactgaaagtctgactaaggaaaaca

SEQ ID NO: 1150 - DNA, 736 bp, Homo sapiens
  misc_feature (1)...(736): n = A,T,C or G
ttaaaagggctccgtccatccagactgacgagaaatgggtttccagctctgcacctggccgtttacaaggacagcccggaacttatcacttcactgttgcacagcggagcagatgttcagcaagtgggatacggtggcctcacagccctccacatagctgcaatagctggacacccagaggctgcagaagtgctgctacaacatggggccaatgtgaatgttcaagatgccgtcttcttcaccccactgcacattgcagcctactatgggcacgagcaggtaaccagtgtccttttgaagtttggtgctgatgtcaatgtaagcggtgaagttggggacaggcctctgcacctggcctctgcaaagggcttcttcaacattgtgaaactcctggtagaagaagggagcaaagcagatgtgaacgctcaggacaatgaagaccacgtccctctgcacttctgttctcgatttggacaccacaatatagtgagctacctgctccagagtgacttanaggtccagcctcacgtcattaacatctatggtgacactcctttgcacctggcatgctacaatggaaattttgaantttggccaanggaaattnnncnaggtaaccanggaacctggaaaggtnttgcctaaaggaaaaancattttttcaggcgagaacaggcttttttaacaggggcnttgntccctattggnaannaacanttgnccctgggcaaaaatt

SEQ ID NO: 1151 - DNA, 740 bp, Homo sapiens
  misc_feature (1)...(740): n = A,T,C or G
ccacgcgtccgcccacgcgtccggtacccgtgaagggcagcagcacaggagaaaagcaaagacttctttaaaatggggaattacaaatccagaccaacacagacttgttctgatgaatggaagaagaaagttagtgaatcttacgctattatcatagaaaggctggaggataacctgcagatcaaagaaaatgaatttcaagaactaaggcacatctttggctctgatgaagccttcagtgaagtcagtttaaattaccgcacagagcgtggcctgtccctgctacacctctgctgtgtctgtggcggcaacaagtcacatatccgtgcccttatgttaaaagggctccgtccatccagactgacgagaaatgggtttccagctctgcacctggccgtttacaaggacagcccggaacttatcacttcactgttgcacaagcggagcagatgttcagcaagtgggatacggtggcctcacagccctccacatagctgcaatagctggacacccagaggctgcanaagtgctgntgcaacatggggccaacgtgaatgttcaagatgccgtcttcttcaccccactgcacattgcagcctactatgggcacgagcaggtaaccagtgtccttttgaagtttggnggtgatgtcnatgtaagcggtnaagttgggnacaggcctccgcccctggccnccgnaaagnccgctcgcgnccttgtanactnctnggagcagaagg

SEQ ID NO: 1152 - DNA, 830 bp, Homo sapiens
  misc_feature (1)...(830): n = A,T,C or G
agagtcagggtttcaccatgttagccaggatgatctcgattttctgatctcatgatccacccgccttcgcctcccaaagtgctgggattacaggcgtgagccgccgtgcccggccggttcttaaactcttgtaagtctttgcaaatgtgctgaaagacatggactctcttcagaaaggcgtgtatgcaaatattttccacgcaaaatccaaggttttatcaacctcctgaagtccaagttaagaattttaatctagtctgaccattcatttagtgcttcagcttaagtgtttatataaccatccgggctgcttctccttcaggcttgagggcccagaagcagggaaacgtgagtaggaaggtaagaaaagggaaagccccagctgggcctggatgggaacagtcctcacctcaagatgcccactatgcactgcatggtgcagggcactgcgcccgctcctgtcagccacgttgaggctgctcaacaggggtgccagagcctcagcacacttggtggcccggttggcagcagccacatgcagtggtgtctgccacagcttgtcccgggcattcacatctgctgaatgtgccagcagcagccccagcaccttctcgtttcgggaggcagcagcacgatgaagaggggtcagccacagtgtgtccttagcattgacattagcacctgacanagtagcaactggaggatgggacatcgcctacgtaggcagcagcatgcaatggagttcgcctctcttggtcctgggaaggcaaaaaagagcagngagtatgggcgcggggtaagggggctatcaagnaccccagcncaagtct

SEQ ID NO: 1153 - DNA, 465 bp, Homo sapiens
tccgccccaatgctcgagataattggaattatactcctctccatgaagctgcaattaaaggaaagattgatgtttgcattgtgctgttacagcatggagctgagccaaccatccgaaatacagatggaaggacagcattggatttagcagatccatctgccaaagcagtgcttactggtgaatataagaaagatgaactcttagaaagtgccaggagtggcaatgaagaaaaaatgatggctctactcacaccattaaatgtcaactgccacgcaagtgatggcagaaagtcaactccattacatttggcagcaggatataacagagtaaagattgtacagctgttactgcaacatggagctgatgtccatgctaaagataaaggtgatctggtaccattacacaatgcctgttcttatggtcattatgaagtaactgaacttttggtcaagcatggtgcctgtg

SEQ ID NO: 1154 - DNA, 358 bp, Homo sapiens
  misc_feature (1)...(358): n = A,T,C or G
cnccccccgtccggttctagatcgcgatctagaactagtgctgactgtgtggagttacttctggaaaaaggagccgaggtgaatgccctggatgggtataaccgaacagccctccactatgcagcagagaaagatgaggcttgtgtggaggtcctattggagtatggtgcaaaccccaatgctttggatggcaacagagataccccacttcactgggcagcctttaagaacaatgctgagtgtgtgcgggctctcctagagagcggggcctctgtcaatgccctggattacaacaatgatacaccgctcagctgggctgccatgaagggaaatcttgagagtgtcagcatccttctgg

SEQ ID NO: 1155 - DNA, 1675 bp, Homo sapiens
gtaaacagagggcctgcccccgacagcttctgcttccgggtcacgccttgacagcggctttcaacccccacctcagcccagcaattcggcagtttggagcatgtgaacaccttgagccttgatgagttccagtatgtggtatattatgcagagcattcagagcaaatactctctctccgagcgcttaatccgaacaattgctgccatccgttccttcccacatgataatgtagaggacctcatcagagggggagcagatgtgaactgcactcatggcacactgaagcccttgcactgtgcctgtatggtgtcagatgctgactgtgtggagttacttctggaaaaaggagccgaggtgaatgccctggatgggtataaccgaacagccctccactatgcagcagagaaagatgaggcttgtgtggaggtcctattggagtatggtgcaaaccccaatgctttggatggcaacagagataccccacttcactgggcagcctttaagaacaatgctgagtgtgtgcgggctctcctagagagcggggcctctgtcaatgccctggattacaacaatgatacaccgctcagctgggctgccatgaagggaaatcttgagagtgtcagcatccttctggattatggcgcagaggtcagagtcatcaacctaataggccagacacccatctcccgcctggtggctctgctagtcaggggacttggaacagagaaagaggactcttgctttgagctcctccacagagctgttggacactttgaattgaggaaaaatggcaccatgccacgagaggtggccagagacccgcagctatgtgaaaaactgactgttctgtgctcagctccaggaactctaaaaacactcgctcgctatgccgtgcgccgtagcctgggactccagtatctccccgatgcagtgaagggccttccactgccagcttctttgaaggaatacctgttacttttagaatagccggagaagatgtttgcaccatcgtgcaggcagctctgggtgaggttgtccctgcagtactccttgtcacagaaaacagaaaaacagttgttcctgttgtgtggtttatagatttcgaagcaacatgtcacaacaataacctccatagcacctccccttcccaaaccaaacaacccaacaaaaaaaatccctcacttttgttttctgtttattgcttacctggctttttatattgcattttgcaaaagaagaggtctccctcaatcctcccctttagggaaggagtcaacagtgtaactaaatttctctaggaagatggaaagtacttaaataatgtgtgtgtggttttcctttggggacgtggttaacggtccagaagaatcccttctagaaagcattttaggccagccatggtggctcacgtctgtaatcccaggactttgggaggctgaggcaggtggatcacctgaggtcaggagttcgagcccaagcctgaccaatatgatgaaaccccgtctctactaaaaatacaaaaattagctgggcatggtgatgcgcctgtaatcccagctactcaggaggctgagacagaagaatcgcttgaacctgtgaggcagaggttgcagtgagccaagatcgcgccattgcactccagcctggacaacaagagcaaaactgtctcaaaaa

SEQ ID NO: 1156 - DNA, 389 bp, Homo sapiens
  misc_feature (1)...(389): n = A,T,C or G
ctccgggagaaacatgccctgactgccgccgcaggaagagggaagctggaggtctgtgagctgctgctggggcatggagctgctgtgtcgcggacaaacaggagaggggttccacctttgttttgtgcagcacgccaggggcattggcagattgttagactgctgttggaacgcggctgtgatgtgaacctaagtgacaagcaaggccggacgcccctcatggnggctgcttgtgaagggcacttgagcaccgnggaattcctcctttcaaaaggtagcagcgtgatgccctcaaaggtttcttttggacggacacagagagaacttcagcanacccattcagtgctttctgattcaaattctaagttttctgttaatggaaattttct

SEQ ID NO: 1157 - DNA, 454 bp, Homo sapiens
  misc_feature (1)...(454): n = A,T,C or G
nnnnnnnnnnnnnnnnnnnnnnnnnnntgcagatgtgaatgccaaggacatgctgaagatgacagctttgcattgggccacagagcgccaccatcgagatgtcgtagagttacttatcaaatatggagctgatgtccatgctttcagcaaatttgataaatcagcctttgacatagctctggagaaaaacaatgctgagattttggtcatcctccaggaagcaatgcagaatcaggtgaatgttaatccagagagagccaaccctgtgactgaccctgtgagtatggctgctccattcatcttcacgtcgggtgaggntgttaacctcgcaagccttatttcttcaaccaacaccnccnagngnaacagncgnttnanctacanattaantganaannnntnnacaagaaacacnggaanctggggnaanaaagngattgaatacnaaaanggg

SEQ ID NO: 1158 - DNA, 907 bp, Homo sapiens
  misc_feature (1)...(907): n = A,T,C or G
cgcggaagcactgcgggcacttgaagggcttctcgtgggtgtggatgcggatgtgccggaccaggtcgctgggcttgcggaactccttggcgcagtaggacacacatgccagcgcacgccgttctcctcgcggatggagccaggtagaaacggtgacttcttctttatcatttttttttcttttttatccagtttctccgggctttcctgttctttttcttgctctgcgtctgtggggtccgtctgctcatttgaaacgctggaaacatctgggttttgagcgtgtggtgcagaggtcttggcatggcaggagtcattaggatgtgctgcagctggaattgaagacagcccactgttttctaaggcttgctgtaaaatgtcctggttgatgcccactgtgatgctcagctgctgcccaggctgcggggactgccccgactccaccggcgccggctctgagagctccaggagctgctggatgacgtcgctcaccgcctgggagctcggctggcttgaggccgacgtggcttgggcttccgtctgttgaagaggtaacgtctgaaaaagtgtggccgttaaaacatgagcagtctctgtagaacttgttgaattctgtggcgcacccatatgcatcttgctgatatgcgtgtttaagctgcctaaacttttaaatacacaactacattctgtacagttataggtaggaccattcttgacctctgagtggactcgctgcacgtgcgactgaagattccctttctgagaggaggcggaggacagaaggcacaggcatggggtttttcacctgtgtgcttgatcatgtgggtctgcagtgccccctnctggtaaaaggccttgcacattcactacatttgaacggcctttcacctgtgggtattctaatgtg

SEQ ID NO: 1159 - DNA, 1575 bp, Homo sapiens
cgtcggccgcggccctggccagtcacctggaggcccactcgggcccggccacctacggctgcggccactgcggggctctgtacgcggcgctggccgccttggaggagcaccggcgggtcagccacggtgagggcggcggggaggaggcggcgaccgccgcccgggaaagggaaccggcgtccggggaacccccgtctggctccggccgcggcaagaagatcttcggctgctccgagtgcgagaagctgttccgctcaccgcgagacctggagcggcacgtgctggtgcacactggcgagaagccgttcccgtgcctggagtgcggcaagttcttccgccacgagtgctacctcaagcgccaccggctgctgcacggcaccgagcggcccttcccttgccacatctgcggcaagggcttcatcacgctcagcaacctctccaggcacctgaagctgcaccggggcatggactgactgccaggctgcgtgcgccctgcccttcacccagcctactggactcggcctggaccaggggaccttcgggactgcgcgtgaggccccggccctccaaatccaaatccagacgcaggccctgaaatgaggggaccctgactggagaggtgggggccaccaaaaacccacaaaggccccggagctgggggaccacaaacaaacagggtccttagctggggcaggggagcccaaatctagggagagactcctgagcctgaggtccctggaatgagtgtgggtagccgtaagtccccaagacatggggactttgcagtgagcaatgggtctccacaagtacctctcatcttgagagccctaatactaaaagatgggcacccacccccaccaagggaagactgccccattccctgagagccatcattcctaacgaccttgatctggagaatgtggagggagcatgtccctgaattttcctagatccctccaaatgccacccaccagagtcactggtgaccccagaaaatggatatagccgaaatctgcctttcccctttttcattccctgtgctgaaagagggaaccagggtaaatgccccctgccctcgaatccccccctccccgactgtggaatggatcgaccctaacgattcttccccgccccaaacactagaatagactggcctgaaatccccttgcccagtagaatggactgatctatgtgcacacacccccatcacatggaatgggctggtctaggctgtggcctgccaccttccttagagtgaatagggcggacactcctctcttttcctgtagcgtgtggaccggtccacgcaattctttatcctgtgaactcatctgagtgggaggtggtggacactggggtttccttccctctctccgtagcatccgttggtctttctctccatctctgttggtttgtctgtctctgtcttcctcccaatccctaggggaagggggcatttggctagggggtgcccctgtgagcctcgaccttgccccctcgtccctctccccagtgtttccaggacccccaataaaccttgtcctgtcagtcaaaaaaaaaaaaaaaaaaaaaaaa

SEQ ID NO: 1160 - DNA, 430 bp, Homo sapiens
tattctctttctgacggaagctcttgttacatttactacagtggaaaggtttttctcctgtatgcgttctctggtgtgtgaggaaatgggaacgctgattgaaggtcttgccacactcaggacatcgatagggcctgtctcctaagtggattcgctgatgggtaataaagtgggagctctgattgaagctcttcccacactctccacatttgtagggtctttctccggtgtggattcgttggtgcttaatgagggcggagctgtcggcgaatcctttcccacagttttcgcacttaaaaggtctctcacctgtgtgtgttctttggtgcgtgaccaaatgtgagctctgactgaagcttttgtggcagtcaggacaactgaaagccctctctcctgaatgagtgctcatgtgagctacaaaatgagaact

SEQ ID NO: 1161 - DNA, 120 bp, Homo sapiens
  misc_feature (1)...(120): n = A,T,C or G
ttnctccccggaggcccggcaccggacgctggccgactantncgagtgcacggcctgccgcgtgagcttccaccccctcgaggcctacctggcgcacaanaagtactcgtgccccgctgc

SEQ ID NO: 1162 - DNA, 709 bp, Homo sapiens
gttttgtgggaaagcctgcccttgtctcagcatatatcttatacatgaacgagttcacactggagagaaaccatataaatgtaaacaatgtggtaaagcctttagttattcaacttcccttcaaatacatgaaacaacccacactggagagaagccttatgaatgtaaggaatgtgggaaagcattcggtagtcccaattccctttatgaacatagaagaactcacactggagagaagccatatgaatgcaaacaatgtggaaaagccttcagatggttccattcctttcaaatacatgaaagaactcacagtgaggagaagccttatgaatgtaccaaatgtgggaaagcattcaagtgtcccagttatctttgtagacatgaagtgacccactctgggaaaaagccctgtgaatgtaaacaatgtgggaaagcattatcttatcttaactttcaaagacacatgaaaatgcacactagaatgagaccttataaatgtaagactgtggaaaagcctttgattctcccagttcgttttgaagacatgaaagaactcacactggagagaaaccttatgaatgcaagcactgtggtaaagccttcaatcgttccagttcctttcactatcatgaaaggactcacactggagagaaaccctatgaatgtaagcagtgtggtaaagccttcattttttccacttcctttcgat

SEQ ID NO: 1163 - DNA, 502 bp, Homo sapiens
  misc_feature (1)...(502): n = A,T,C or G
ggcgatcgaccacccgtccgggggggctacgtcggagaccaccagctttgtgccccgccaccccacccgcatgcgcaccacctccttccagctgccggagggcagcatctcctagggccgcccgacggggctaaggccttggaagtagccgccccggagtctcaagggctggattccagcctggacggggcggcgcgtcccaaaggctcccggcggtcggtgccccgcagctcaggccagaccgtctgtcgctgccccaactgtctggaggcggaacgactgggggctccatntgggcccnatgggggcaaaaaaaaacatttgcacaactgccacatcccgggctgcgggaaaacctacgccaaaacttcncacctgaaggcgcacctgcgctggcacagcgggcaaccgtcccttcntntgcaactggctcttctgcggcaagcgcttcacccnctcgganaaactgcagcgccacctcnanacccacaccgggcaccaa

SEQ ID NO: 1164 - DNA, 471 bp, Homo sapiens
ccgcgtccggaagaagccctatgaatgtactgaatgtgggaagaccttccctcggaaaacacagctcattatacatcagagaacgcatactggagagaagccctataagtgtggtgaatgtgggaaaactttctgccaacagtcccacctcataggacatcaaagaattcatacaggagaaaaaccttatgtgtgtactgactgtgggaaggccttttcccagaagtcacacctcactggccatcaaagacttcatactggagagaaaccttatatgtgtactgaatgtggaaaatccttctctcagaaatcacctcttatcatacaccagagaattcatacaggggagaaaccttatcagtgtggtgaatgtggcaaaaccttctcccagaaatcactcctcattattcatctgagagttcacacaggggagaaaccttatgagtgtactgagtgtgggagggccttttt

SEQ ID NO: 1165 - DNA, 591 bp, Homo sapiens
tgtcgaccccgcgtccgcggacgcgtgggcggacgcgtgggcagagatatgataagtacagcaaagtctctgttgaatcaccaagcattgatagggataaggtaaatgatattcaaagaaaaccatgcctgtttatgggaagtgataaatccttcaatttctatttaaatatgactcaaaatgattcaagccacactagagagaaaacgcaaaaatataaagtatataaactggagattacctctccttcgaaacttgttgggcatccgagattctttgttcaacaaaaatataggaaatctgggaaatactccaggaactcctcaggcctcactagacttaagatgcttcaacctggaggaacgccatgcaaatctacagaatgtgggaagtccttttctcagttctcaggctacagagagaattatacaatccatactggagaaaaaccttataaatgtaaaatatgtaaaaggtcttttactacaggttcatatctgcaagctcatcagagaatccacactggtgagaaaccatacagatgtaaagagtgtggcaaggcctttactcatggctactctcttcaaattc

SEQ ID NO: 1166 - DNA, 524 bp, Homo sapiens
cgccccccccccgcaaacgcaataattttggaaaggattcaccttatagctctaatcttcaaactcatcagagagttcacacaggagaaaaaccatataaatgtgaagaatgtggtaaagtgcttcagtaacacctcaacacttttcacctacatcaaagagaccacacagagagaaaccatacaaatgtgatgagtgtggtaaaagcttcagccagaaatcataccttaatattcaccacagagtccacacaggagaaagaccatataaatgtaaggcatgtggaaagggcttcagtcataaatcatacctccaagcccatcagagagtccacacaaaagagaaacagtacaaacactataagcgtggaaaggaccttctgactcatcaaagactacatgagcagagagaaacattataaatgtagtaagtcagggttcaattagtaaaacagaagccacactgtattccagatgatagaggcttactcagcctgtgggagggctaggggagcaaaagacagg

SEQ ID NO: 1167 - DNA, 421 bp, Homo sapiens
cgaccccgcgtccgcccttttttacataagaaaattcatactggagagaaaccatacaagtgtgataaatgtggcaaagcctttatttcatcctcaacccttactaaacatgagataattcatactggagagaaaccctacaaatgtgaggaatgtggcaaagcttttaaccgttcctcaaaccttactaaacataagagaattcatactggagatgtaccctacaaatgtgacgaatgtggcaaaacctttacctggtactcaagcctctctaaacataagagagctcatactggagagaaaccctacaagtgtgaagaatgtggcaaagccttttactgcattctcaactctaactgacataagataattcatactggagagaaaccgtacaaatgtgaagaatgtggcaaagcttttt

SEQ ID NO: 1168 - DNA, 551 bp, Homo sapiens
  misc_feature (1)...(551): n = A,T,C or G
cgcgtccgcccacgcgtncggacctacataaatgaagataagttagagaagcaacanggcaaaaagaacagactttggagtggagtgttagttaccatcaaaaaagtctacatgaaggagaggagctttaaaggtgttgaatttgggaaaaatcttggtctaaaatcatcgcttattagaaaaccgagaatagtttccagaggaaggagaccccgttcacagcagtattcagttctctttaaacaactgggggtcaacacagtgcgtaaatgttataaatgtaatatctgtgggaaaatcttcctccacagttcctccctgagtaaacaccanagaatccacactggagagaanctctataaatgtaaggaatgtaggaaagncttcagccaaagctcatccctaactcagcacttgagggttcatacaggagagaaaccttatatatgtagtgaatgtggaaaagccttcagtttcaccacatntnttattggacaccanagaatgcatactggagagagaccttataaatgcaaggaatgtggaaaaac

SEQ ID NO: 1169 - DNA, 576 bp, Homo sapiens
  misc_feature (1)...(576): n = A,T,C or G
tcgacccnnnnnnnnnnnnnnnnnnnnnnnnnnnnnnnnntggagagtgtgggaaatcttttagtcataaaggcaccctcattctacatcagcgagttcaccctagagaaagatcttatgggtgtggagaatgtgggaaatcttttagttcaatcgggcaccttaggagccatcagcgcgttcatactggagagaggccttatgagtgtggagaatgtgggaaatcttttagtcataagccgcagccttgttcaccatcagcgcatgcacactggagaaagaccttacaagtgtggagactgtgggnaaatcttttaatgaaaaagggacacccttaggaatcatcagncgagttcacactaccaggaaagaccttttaaggtgtggggggaatgtggggaaaattgttttttaagtcaccaaggggtaacctcatttctacaccaggcatgggcccatacttgggagaaagacccttaatgtatngtagggggaatggtggnaaaaattattttaagaagaaagtctcaacctccctttgtacaccaagnagaatttcacaaaaggggagaaaaa

SEQ ID NO: 1170 - DNA, 442 bp, Homo sapiens
tactatagggagtcgcccacgcgtccgcttcaccagaagtcgattctcattgtgcaccagaaaatccacaccggggagaaaccctacgtgtgcaccgagtgtgggagagctttcatccggaagtccaacttcatcacccaccaacgaatccataccggcgagaaaccttaccgatgcaacgactgcgggaagcccttcacctccaagtcgcagctcctggtgcaccagccaatccacacgggccagaaacctcacgtgtgtgccgagtgtgggaaaacctttagtggcagatcaaacctcagcaagcatcagaagacgcacactggggagaagccgtacatgtgttctgagtgcgggaagaccttcaggcagaagtcagagttgattacccaccacagaatccacaccggggagaagccttacgattgcagtggctgcggga

SEQ ID NO: 1171 - DNA, 421 bp, Homo sapiens
cacgctttgcgaacgccgcttcttctcctcttccgagttcgtgcagcaccgctgcgatccggcccgcgagaagccactcaagtgcccagactgcgagaaacgcttcaagtaccgcgtcagacctgcagcggcaccggcgggtacacacaggcgagaagccctacaagtgccccaactgcgacaaggccttcaagcagcgggagcatctcaacaagcaccagggcgtgcacgcccgcgagcagcagttcaagtgtgtatggtgcggggagcgcttcctagacgtggccttgttgcaggagcacagcgcgcagcacagtgccgccgccgcggcagcggagggcgcctaccaggtagccgcctgcctgccctgactctgcggctgtggcccctaccagcctgacctgagtcggcgccgtgggcc

SEQ ID NO: 1172 - DNA, 397 bp, Homo sapiens
  misc_feature (1)...(397): n = A,T,C or G
cgtccggaaacttcccctctccnagatgttagctctttgccaatcatccacccagtgttttagggtttttggaatattcttcggtggttgtatatgacttttttcgtaaggcagtgggaaataagccttttccttttttaatcttgtttcctgctgccatctgtgtgtgtatgtgtnngaaggagacaaaccccataagtgtgaagtctgtggcaagtgctttagccggaaagacaagctgaaaactcacatgcggtgccacacgggcgtgaagccctacaagtgtaagacgtgtgactacgccgctgccgacagcagcagcctcaacaagcacctgaggatccactcggacgagcggcccttcaaatgccagatctgcccctacgccagccgcaac

SEQ ID NO: 1173 - DNA, 480 bp, Homo sapiens
  misc_feature (1)...(480): n = A,T,C or G
ccacgcgtccgctcggacgagcggcccttcaaatgccagatctgcccctacgccagccgcaactccagccagctcactgtccacctgcgatcccacacgggggacagcccccttccagtgctggctctgtagccgccaagttcaaaatcaagctcggacttgaaaaggcacatgccgggttgcactcggngtgagaaagcctttcaaagtgcgaagttctgcaatgtctcgctgcacccatgaaggggaaaaccaanaaacacatccaaaacaaccacatcaaaaacaacaacaagtgtaataaactctacaaactggttcacacaaaagccaacctccctaagcacagcaccaagcaaaantcccaacacccccagaaatgcaccaaacccacngttgccacccaagtttcggggagcaatccctggaggaaaggtgcttcnggaaatggccaagcntacnttccttgcttcccaagcc

SEQ ID NO: 1174 - DNA, 693 bp, Homo sapiens
aataaaaggaaaagtccttgcaccatgtagatcagcgtcccccactttggcatcccggccggccggggacctcccagtctgcggccatgaacgcgagcagcgagggcgagagcttcgcgggctcggtgcaaactccaggtggcacaacggtgctggtggagctgactcccgacatccatatctgcggcatctgcaagcagcagtttaacaacctggatgcctttgtagctcacaagcaaagtggctgccagctgacaggcacatccgcagcagcccccagcacggtccagtttgtatcggaggaaacagtgcctgccacccagactcagaccaccaccagaaccatcacctcggagacccagacaatcacagtttcagctccagaatttgtttttgaacatggctatcaaacttacctgcccacggaaagtaatgaaaaccagacagccactgtcatctctctccctgccaagtcacgcaccaaaaagcccacaacaccacctgctcagaaaaggcttaactgttgctatccaggttgccaattcaagactgcttatggcatgaaggacatggagcggcatttaaaaattcacacgggagacaaaccccataagtgtgaagtctgtggcaagtgctttagccggaaagacaagctgaaaactcacattgcggtgccacacggggcgtgaagcc

SEQ ID NO: 1175 - DNA, 1111 bp, Homo sapiens
  misc_feature (1)...(1111): n = A,T,C or G
cacgcgtccgcgcgcccccggcgccgcgccctccgccgccgccaagagccactcgctgtcccttcccggactgcgccaaagcctactacaagtcctcgcacctaaagtcgcacctgcggacgcacacaggggaacgcccttttgcttgtgactggcagggctgcgacaagaagttcgcccgctccgacgagctggcccgccaccaccggacgcacacgggcgagaagcgcttctcctgccctctgtgctccaagcgcttcacccgcagtgaccacctggccaagcacgcccgccgccaccccggcttccacccggacctgctccggcgccccggtgcccgcagtacctcccccagcgactcgctgccctgcagcctggccgggagccctgcgcccagccccgcgcccagcccagcccccgcaggcctgtagggccctcgtgcagcccaccctgaccgccaggatgcttctgccatccaggggtgtagtgaggacccacggggagcctgggccccttccagccgtgggcaaaccctgaagacacccctgcccccctccagagagtgaggagggggcctgagactggacctgggtctgcctgacctcagaggtggctctcaggatgggtgacgggggcttgtgtctgtaaatagccatgatactaactttcttcccatctgtgcaacggggcccccccagggcagctaggangtcctcccctctcctctccaccaccccctgctgcccccctcccggggtggggtttgggggggtggaatggacttctgggaaccggcccggggaaagcaccccctgccccatccctgcanattgggatgaagtgttcanacanccatanaagaatcnggggttganacnggccctgcctctccccaccccacccancccncnaaagccatnggantattcanggaaatnggggtgcancccanccncccccantcnggtantcnatctcnngtgtccananttctgcccncngtnngggctncctnncccccnnaactcnggggtananccnnnaatngggcncnttnngancccnnaagggccccnnntttttcttctnaaancctnggatngggaaggga

SEQ ID NO: 1176 - DNA, 2122 bp, Homo sapiens
cgagtccggaggaagcggccacggcagagcctggtgcctgaagaggagtcggagatggcggctgcagaggctgtgcatcacatacacctgcagaacttctcacgctctctgcttgagaccctcaatgggcagaggcttgggggacacttctgtgacgtgactgtgcgcattcgtgaagcttcgctgcgtgcccaccgctgcgtgctggcggccggctcacccttcttccaagacaagctgctgctcggccactctgagatccgtgtgcctccggtggtgcccgcgcagacagtgcgacagctggtaaagttcctgtacagcggttcgctcgttgtggcgcagggtgaagccctgcaggtgctcacggccgcgtcagtgcttcgcatacagacaagttatcgacgaatgcacgcagattatcgcccgcgctcgagccccgggcacctctgcgcccacgcccctgcccacccctgtgcccccgccactcgcacctgcgcagctgcgtcaccgcctgcgccacctgctggctgcacgtcccccggggcaccccggtgctgcacacaacccgtaagcaagcgccagcccgcgcgtttgcagctgccagcgcccccaacacctgccaaggctgaggggcctgatgctgacccctcactgtccgcggcccctgatgaccgaggtgacgaggatgacgaggaaagtgacgatgagaccgatggcgaggatggcgaaggtggcggcccaggcgagggccaggcacctccttccttcccagactgtgctgctggcttcctcactgctgctgctgacagcgcgtgcgaggagccccctgcacccactggccttcgctgactacaagtggtgccgggagaagaattttcttcggggagctgggtcagctgaggacgtatttccagacagctatgtatccacttggcacgacgaggatggcgctgtccccgaaggctgtcccactgagaccccccaccacccctactgcatactgtctggatcccgcccgcctggtgtgaagaccccagggccgcccgttgcactcttcccctttcacttgggtgcccctgggccacccgcaccacccccttcagcaccatcggggccagcccctgcgcccccacccgccttctaccccacactccagcccgaggcagcccccagtactcagctgggggaggtcccggctccctctgctgctcccaccacggccccctcaggcacccctgctcgcaccccaggtgctgagccacctacgtatgagtgcagccactgtcgcaagacgttcagctcccggaaaaactacaccaagcacatgttcatccactcgggggagaagccgcaccagtgcgccgtgtgctggcgatccttctctctacgcgactacctgctcaaacacatggtcacgcacaccggcgtgcgcgccttccagtgcgccgtctgcgccaagcgcttcacgcaagaaagagctcgctcaacgtgcacatgcgcactcaccggcccgagcgcgcgccctgccccgcctgcggcaaggtcttctcgcaccgcgcgctgctggagcgccacctggcggcgcaccctgcgccctgatggcgctggggcctggcctcgcccacggtggatccggggcctcccgcacagtcggccacgcccgctgcgggacccgtggttcccgccactagaccacgctccctcctgagcgcaggtcctctctctcccttcaccctttctccataccagggcctaagtccgccttactcctctcctccatgtacttgaaccctccaggtggtgccgggctggggctggggctggttagaccacttctgagaactggactatttcctgcgtaaaccgggcgctcaggcgcttggacccggcccaagatttgactccggttctcaccccgccctctcctggggtggtggtgggggctggggggccgcttgcctgccccagggtcaggctgggcaaggtccctagctctctacccaagctgttactccctcatggggcgcctaaggagactcaagtggacccatcatatatgggggctgggcctcgggactctcgctctaataaaggactgtaggccatggggcctaaaccacga

SEQ ID NO: 1177 - DNA, 758 bp, Homo sapiens
  misc_feature (1)...(758): n = A,T,C or G
gctcagcttggagagaaaccctacacatgtgaagaatgtggcaaagcctttagacggtccacagttctgaacgaacataagaaaattcatactggagagaaaccctacaaatgtgaagaatgtggcaaagcctttacaaggtccacaacactgaatgaacacaagaaaattcatactggagagaaaccctacaaatgtaaagaatgtggcaaagcctttagatggtccacaagcctgaatgaacataagaatattcatactggagagaaaccctacaaatgtaaagaatgtggcaaagcctttagacagtccaggagcctgaatgaacataaaaatattcatactggcgaaaaaccctacacatgtgaaaaatgtggcaaagcttttaaccaatcctcaagtcttattatacacaggagcattcattctgaacaaaaactttacaaatgtgaagaatgtggcaaagcctttacttggtcctcatcccttaataaacataanagaattcatactggagagaaaccctacacatgtgaagaatgtggcaaagctttttataggtcctnacaccttgctaaacataagagaattcatactggagagaaaccctacacntgcgaagaatgtggcanancttttannctatcctnaactcttatattacacnngagactccattctgggcnaaagccttacaaatgtgaagaatgtggcaaagcctttncaccngtccacaacactgaacgaacataagaaaa

SEQ ID NO: 1178 - DNA, 1580 bp, Homo sapiens
  misc_feature (1)...(1580): n = A,T,C or G
tttagggatcgaccccgcgtccggagcccatgaatcttaattttaaagtgaaagaggagcctaaggaaggggagtccctaagcacgactttgcctcggtccagctatgtgttcagcccggaatctgaagtgtcagccccagncgtctctgaagacnaactaaagccccaggaagggaagggaagtgtgctaaggcgggatgtgtcagtcaaagcagcctctgaacttctcatgaaactctcagcggaaanctacaaggaaacacagatggtgaagattaaagaggaacccatggaggttgacatccaggactcccatgtctcgatatcacccagccggaatgttggctacagcactttaatcgggcgagagaaaaccgaacccttacagaaagatgccagagggcagagtacccccaagagagaaacctcttcagtcaggatatctctgtgaaaatggcttccgagctcctctttcaactgtcagaaaaagtgagcaaagagcacaatcatacaaaagaaaacaccatccggaccacgaccagccctttcttttcagaagacacatttagacaatcaccattcacctccaattcaaaagaactgctgcccagtgactccgtgctgcacggaagaatatcagctccagaaacagaaaagatagtcctagaggcaggaaatggattaccatcctggaaattcaatgaccagctttttccctgtgacgtgtgtgggaaagtgtttggccgacagcagacattgtcccgacacctctcgctgcacacagaggaaagaaaatacaaatgccacttgtgcccctatgctgctaagtgccgtgcaaatctgaaccagcacttgaccgtccattccgtgaagctggtgagtacagacaccgaggacattgtcagcgccgtcacctctgaaggcagtgatgggaagaaacatccttattattacagttgtcacgtgtgtggatttgagaccgagctcaatgtccagtttgtcagccacatgtcactccacgtggacaaggagcagtggatgttttcgatctgctgcactgcctgcgacttcgtcaccatggaggaagcagagataaagactcacattggcaccaagcacacaggggaagacaggaagacccccagcgaatcaaatagcccctcttcatcctccctctcagctctgagtgattcagccaacagcaaagatgattcagatggctcccagaaaaacaagggcgggaacaatctgctggtcatctctgtcatgcctgggagccagccctcactgaacagtgaggaaaagccagagaaagggttcgaatgtgttttttgcaactttgtctgcaagacgaagaacatgtttgagcgtcatctgcagatacacctcatcacccggatgtttgagtgtgatgtgtgccacaagttcatgaagacccccgaacagctgctggagcataagaaatgccacactgtccccaccggtgggctcaagtaaggaaagcaactcangacagtggtgagtttcaagactcctctaggtgcccattctgcatttattncaccaaccgccccgctgc

SEQ ID NO: 1179 - DNA, 407 bp, Homo sapiens
gctcaatgatggagtacaagtgccggatctgccagacggtgaaggccaaccagctggagctggagacgcacacccgggagcaccgcctgggcaaccactacaagtgcgaccagtgcggctacctgtccaagaccgccaacaagctcatcgagcacgtgcgcgtccacaccggggagcggcccttccactgtgaccagtgcagctacagctgcaagcgcaaggacaatctcaacctgcacaagaagctgaagcacgccccacgccagaccttcagctgcgaagagtgcctgttcaagaccacacaccctttcgtcttcagccgccacgtcaagaagcaccagagtggggactgccccgaggaggacaagaagggcctgtgtccagcccccaaggaaccggccggcccg

SEQ ID NO: 1180 - DNA, 570 bp, Homo sapiens
gcgtccgaaaaaaaacaaatgtaatgaatgtggcaaagtcttcagttacaattcacaccttgcacaacatcagagaatacatactggagagaaaccttacaaatgcagtgactgtggcaagctacccactccacatccttgcctaacacaacatcatagagttcacactggagagagaccttacaaatgtaatgaatgtggcaaagcatttagagactgttcaggccttactgcccatctactaattcacactggagagaaaccttacaaatgtaaagaatgtgccaaggtcttcaggcatagattatccctaagcaatcatcagagatttcataccggagagaaaccttacagatgtgatgaatgtggcagggacttcactcgaaattcaaaccttgcaaatcatcacagaatccatactggagagaaaccttacaaatgcagtgaatgtcacaaagtctttagtcacaattcacaccttgcaccgacataggcaaattcatactggagagaaagtcttacaaatgcaatgaaatgtggcaaggtcttcagccacaagttatacctaaa

SEQ ID NO: 1181 - DNA, 508 bp, Homo sapiens
gaccacgcgtcccgacaaggagtacaccagcctgggtgccctcaagatgcacatccgcactcacacgctgccctgcacctgcaagatctgtggcaaggccttctccaggccctggttactgcagggccatgtccgcacccacacaggggagaagccctatgcctgctcgcactgcagcagggcctttgccgaccgctccaaccttcgggcccatctgcaaacgcactcagacgccaagaagtaccggtgccggcgctgcaccaagaccttctcccgcatgtccctcctggcgcggcatgaggagtctggctgctgcccgggcccctgagaggcacgtggtcgcgcaggtaggagggatggtcctcaccgggagagcttggcgtccctcctgcccccagaggagccaaggagtctgggagggcggggcctggccttcacacttggtgcgtcctccaaattctgcgttccaatcaagaacaaaagaagtccaagcgggggccactgggcc

SEQ ID NO: 1182 - DNA, 456 bp, Homo sapiens
  misc_feature (1)...(456): n = A,T,C or G
cgtccggctgttcctaatagacatgagaactgtaaaccgaggctgacgtgctccactgaccgtccccggccgccgcgcccgaggccgtgccgcccccgccggcgcccccctcctactcggacaagggcgtccagactcccagcaagggcacgccggcgccgctgcccaacngcaaccaccggtactgccgtctttgcaacatcaagttcagcagcctgtccaccttcatcgcccacaagaagtattactgctcctcgcacgccgccgagcacgtgaagtgagcgcccacactacagccgcagacgctttgcacgccccgctgcgatgcggggagggggccgcccccaggccgcacggactgccgctcctgggaaccccgccacgcacaggcctcggnggagggggccgcagggggcagcgcccgcctggacccttggcacttaataaagaagttca

SEQ ID NO: 1183 - DNA, 487 bp, Homo sapiens
ctttttttttttttttctccatcaaaactgaacttctttattaagtgccaagggtccaggcgggcgctgccccctgcggccccctccgccgaggcctgtgcgtggcggggttcccaggagcggcagtccgtgcggcctgggggcggccccctccccgcatcgcagcggggcgtgcaaagcgtctgcggctgtagtgtgggcgctcacttcacgtgctcggcggcgtgcgaggagcagtaatacttcttgtgggcgatgaaggtggacaggctgctgaacttgatgttgcaaagacggcagtaccggtggttgccgttgggcagcggcgccggcgtgcccttgctgggagtctggacgcccttgtccgagtaggaggggggcgccagcggtggcggcaagtcaacatccgcgccggcagggcacggagcctggccgggcggcggttcctgtggctccgggccgaggccgtcccgggggccacgggacc

SEQ ID NO: 1184 - DNA, 777 bp, Homo sapiens
aacacgaccccactgcagaggtcggtgatgatgctgtgggaggtgacgagtccacagctggctgggctcagggctgcggggactgtccccagcaccagccctcagcaggggctcgccggcaacaccggcagacggctcacagcccggcatctgccacccaccccttccactgcagccagtgtcagcgcagtttcagctccgccaaccggctgcaggctcatgggcgggcccatgttggtggcacacatgagtgtacaacctgctccaaggtcttcaagaaagcagcatcgcttgagcagcacttgcggctgcatcgcggggaagcccgctacctctgtgtagactgtggccgcggctttggcacagaactcacgttggtggctcaccggcgggcccacactgccaacccattgcatcgctgtcgttgcggcaagacgttcagcaacatgaccaagttcctctaccaccggcgcactcacgccggcaaaagcggggcacctcccacaggagcaacagctcccccagctccagcggagcccacccctccaccaccaccccctgccccacctgcccagctgccctgcccacagtgctccaagtcctttgcctcagcttcccggctgtcccggcaccggcgtgcagtacacgggccccctgaacggcgtcaccgctgtggggtttgtggcaagggcttcaagaagctgatccacgtgcgcaaccacctgcggacacacacgggtgagaggcccttccagtgccactcatgtggcaagacct

SEQ ID NO: 1185 - DNA, 419 bp, Homo sapiens
  misc_feature (1)...(419): n = A,T,C or G
ccncgcgtccgaaacacccaatagaatccatactggatccaaaccctttaaatgtgaagtatgtttcaggacttttgcccagcggaattcactgtaccagcatattaaagtccacacaggggagcgtccctactgctgtgaccagtgcggcaagcagttcacccagctcaacgccctccagcgccaccgccgcatccacacaggggagaggccattcatgtgcaatgcgtgcggacggacattcaccgacaagtccactcttcggcggcacacctcaatacacgataagaatactccatggaagtctttccttgtcattgtagatggctcgcccaagaatgatgacggacacaagactgaacagcctgacgaagagtatgtgtcatccaagctttcggataaattgctgtcttttgcag

SEQ ID NO: 1186 - DNA, 480 bp, Homo sapiens
  misc_feature (1)...(480): n = A,T,C or G
cccgcgtccgtccagctttcggataaattgctgtcttttgcagaaaatggccatttccacaacctggctgcagtccaagacactgtacctaccatgcaggagaacagttctgctgacacagcctgcaaggcagatgactccgtggtgncccaggacaccctcctggccaccaccatcagtgagcttagcngagctgaccccacanacagactngatgcccncacagtttcnctttttgggcnacatgganannaggngnttnannnggtntncncnctcttnaattctgnggngggtnggctncctnnanccnnaaanantngtggtgggggcttaaaaaaaaanataattntgnnncattgtgcaaaaaggagtgnngggcnaagaatnggccttttggcaagaattttcctgaactttgtgctaaaccttngcacggtttttatcacaagcatttttaaagctttccctcaaaaatcc

SEQ ID NO: 1187 - DNA, 458 bp, Homo sapiens
  misc_feature (1)...(458): n = A,T,C or G
cgggcccatggccctgggaggtacagggggctccctgtcccccagcctggacttccagctnttccnaggngaccaggcccgaaatccaggtgctggagctgncccaaccgactccccaggcctggagcgtggtggnatggcatctccagcaaagcgggtcccattgagttcccagacaggcaccgcagccttgccttacccgctgaaaaagaagaatggcaaaatnctgtacgagtgcaacatatgnggcaagagctttgggcagctctccaatctcaaggnccacctgcgtgtgcacagtggagagcgtccattccagtgtgccttgtgccagaagagcttcactcaacttgcccacctgcagaagcaccaccctggtgcacactggggagcggccccacaagtgctcgatacccntgggttccangaagaaatcactggaaaagcttccaggcctg

SEQ ID NO: 1188 - DNA, 639 bp, Homo sapiens
  misc_feature (1)...(639): n = A,T,C or G
cctgcggctgcactctggcgagcggccctacgcctgcggggagtgtggcaacgcctcccgcaacacgtcgtgcctgcgtcgccaccgccacgtgcatactggcgagaggccccacgcctgcggtgtctgcggcaagagcttcgcgcagacctccaacctgcggcagcaccagcgcgtgcacacgggcgagcggcccttccgctgcccgctctgccccaagaccttcacccactcctccaacctgctgctgcaccagcgcacgcactcggcggagcgccccttcacctgccccatctgcggtcgcggcttcgttatggccgcctatctgcagcggcacctgaggacgcacgccccggccaacacgcctcccagcaccacagcccctgccgccggcccccagccccctgctccactggctgctgcgcgggccccgccagccacccaaagatgtccacgtnctgccccaccttcaggccacgctctcccttcgaggtggcggggggcacggcccaagccccgagcttggggccaagcaagcgcccaactctaaaacgttctttctggtgcaaactgccaaggccttcaagctgatcccaanaaagcgtgcaagcccctacaactttcggcccctttccggaa

SEQ ID NO: 1189 - DNA, 727 bp, Homo sapiens
cggctgaaggctggttgtggatccttgttcctctcctgaccccatctggctgctgccccgtctcccaccccttcgagatggccactactaaaagcctccccattttctttacattcatagtgtttctcccctgaataaattctctgatgcatggtaagttgatacctacatgtaaagcccttcccgcattccttgcattcatagggtttttctccagtatgaattcttttatgacccaccaaggtgggaaaactgacgaaaggcctttccacattcccttacattccatgtggcttctctccagtatgaatactcttgatgtactttaaggcctgctttgagcctaaaggacttccccacattttgttacattcaaagggcttctcaccagtgtgaatactctgatgtcgactaagtcgtccatacacactaaaggccttgccacattccttacattcgtagggtttctcaccataatgaaatctatgatgtacagtaagttgacggctagtcctaaaagcttccccacactctttacattcatagggtttctcaacatgaactttcccatgttgagcaaggtttgcaggataactgaagaccttcccacattcttcacattcataaggtttctcacgagcattaattttctgatgctttctaaggtctgtaagatggctaaatgccttcctaaacttttcacatgatcaggtcggacgcggggcga

SEQ ID NO: 1190 - DNA, 542 bp, Homo sapiens
  misc_feature (1)...(542): n = A,T,C or G
cgtccggaacatgtaagaattnatactggagagaaaccttatcaatgtaaggaatgtggaagagccttcgctgggcgctcaggccttactaaacatgtacgaatacacactggagagaagccctatgaatgtaacgaatgtgggaaagcctacaataggttttatctactaactgaacattttaaaactcacacagaggagaagccctttgaatgtaaggtatgtggaaaatccttcagaagctcttcatgccttaagaatcactttagaattcacactggaataaaaccctataaatgtaaggagtgtgggaaagcattcactgtttcctcaagcttacataatcatgtaaaaatccatactggagagaagccctatgaatgtaaggactgtgggaaagcctttgctacatcttcacaactcattgaacatataagaactcacactggagagaaacccgtatatatgtaaaggaatgtgggaaaacccttccgtgctttttcacatctacanaaacatgttagaaattcacactgggagag

SEQ ID NO: 1191 - DNA, 1700 bp, Homo sapiens
  misc_feature (1)...(1700): n = A,T,C or G
tcctaggcantgtggcaaggccttcaggaaccagtcaacgctgaagacacacatccgaagccacacgggggagaaaccgtacgaatgcgatcactgtgggaaggccttcagcataggctccaacctgaatgtgcacaggcggatccacaccggggagaagccctacgaatgccttgtctgcgggaaagccttcagcgaccactcatccctcaggagccacgtgaaaactcaccggggagagaagctctttgtgtcatccgtgtggaaaaggctccagtgagcgcgcctgctttagagacacaggatgattcagaccggaaacagacctcgtgggtgtaagaggaagcctctgtgagctcgcaccttactgggtgcaaaagaatccacggaacttgggagaagtccagttcctgtaaaaactgggaagacgaggcgttctcatcccataggaggtttgtgagaactcacgccgggggtgaaaatgtaccgtctgtagcatggagaagccttcagggtacattcagctcttaacaaacacaggaggacttaatggcaagcttggcatttaatgtcaaaatccaagccgtggcatttaatgtcaaaatgacttcagaccacttctagccttctgggcccatgagtaataatgagcacactagggagcatctctgtaaacacagtggctggggaaacccttcctagtctcacttgattcctcatgacggaaatcacactaaagagagaaatcagtgaagtaaggaacgtggaaggtcatgaatgggccgcaaaccacggccagctgcttgtctttgtatggcttgccagctaacaatagtggttccatctttaaggaagaagaatgtttgatggagaaaatttgtggccaatgaagtctgaaatacttcctgtcatctgcccctttccagaaaaacttggccgacccttggtctacagcacgggttctcagtcgggcgacgatttggctgtctaggcgtcatttggcaatgtctagagacatttttggtagttagaatggggggaagatactcctgacttgtaataagaagacatcagagatgctgctaagtcggctccagcacacaggagccccccacaacgaagagttagtgcccccaaacgtcactgttgctgaggttgaaaataatcatgcagtcattcctcaattactgcctgcagcaattcctccatttttatgaatcntgcgagcacttacgctaggagaaatttcttttaccaaaacttttaaaatacaattagtgctgataattccctatgtggaaatgattccagccatggtcccctcacttgagcatgtgaatattctcacggagagaagccccagcgagattttccggtgaataccnggattgcacttactctttcatcacggaaacagaccccccgagagaagccccaacgagattttccggtgaatacgggactgcacgtactctctcatcatgaaaacagagccccgttcataaatttttcatctttatttttaaggttatactcctcttaaataacccttaagcctcatcaaggaaaggtttgtttatagtattttttactataggnttcatccttggatnaacgtcctaattttcctttnggggacaacctccttggaccanggggcntattggggatntttgtggacaggggggtntttcttcagt

SEQ ID NO: 1192 - DNA, 250 bp, Homo sapiens
  misc_feature (1)...(250): n = A,T,C or G
gcnnaattgtttaatttcaactccagcctcatgaaacatcagagaattcacactggagaaagaccttataagtgcagtgaatgtggaaaattctatagccacaagtccaaccttatcaaacattggcgtgttcatactggagaaaggccttacaagtgcagcgactgtgggaaattttttacccaatgctcaagcctcatgcaacatcaaaaagttcacactggagaaaagccttttaagtgcaatgaat

SEQ ID NO: 1193 - DNA, 473 bp, Homo sapiens
agagttccactggagaaaagccttttacatgcagtgaatgtggaaaagctttcaggcataattccacacttgttcagcatcacaaaatccacactggagtaaaggccttatgagtgcagtgaatgtggaaaattgtttagtttcaactccagcctcatgaaacatcagagaattcacactggagaaagaccttataagtgcagtgaatgtggaaaattctatagccacaagtccaaccttatcaaacattggcgtgttcatactggagaaaggccttacaagtgcagcgactgtgggaaattttttacccaatgctcaagcctcatgcaacatcaaaaagttcacactggagaaaagccttttaagtgcaatgaatgtgggagattctttagagagaattccaccctagttagacatcacagggttcacactggagcaaagccttatgagtgcaggggaatgtggggaaattt

SEQ ID NO: 1194 - DNA, 1218 bp, Homo sapiens
  misc_feature (1)...(1218): n = A,T,C or G
tttttttttgccaaaatgaaagctttaatgagtgttactcctagacagtcacgtctcagcttctgccagcctccactgtcccagctctcttagctggccgacaggggagctagttgctgaggggtagggatctggagtctaaagagcagagccaggcaaaaggaggtacaggaagcccccgatgggggctgggctcccggagtgtggtgctggggggtcatgggcttcaggccggcccctcttcaggcattcctagcaaagccaccaggggctccaggggtgtgggggtccccatgggcacagggtgggtgcgttcatgcttgcgcaagtcgctggcactcaagaaggccttgggacaatgggggcaggtgtaggggcgcactgagctgtgagtgcggctgtgtttgcgcagcccagcccggtcagagaagctcttgccgcactgggtgcaggggaagggccggagctccgggtgtgagcgctcgtgccgacgcagcagcgtcattgtggagaaggtctccttgcactctcggcacacaaactgggggggcttctcgtcagcctcctcaccccccgcctcgcctgccccttccaagggaccaggagcctcccggacaccagcatcttggcattccacatgctccaccgtcatgcccaccacctgccactgtgtggccatcacaccacctgactccgggggcagccctagcagccctgctggagggtcccccagccccgcccctgctgccggggcggctgaactctcacatgccacgcccacaggcagcgccaaccccaccaccagctcctgtgcagggggcacacccgcggcctcactgcttcgatgggtccgctcgtgcttcctcaggctcgacgacaccacaaaggatttcccacatgcgttacagtggaaggggcgctcccccgagtgcaccagnctatgcttcgtgaggctggcacgctcggaaaaaggctcgcccgcactcctcacagcggaagggccgctggccagagtgcaccagcgcgtgccgcttgaggtcccaggacgccacgaacgtcttgtcacattgcaggcacttgaacggccggtcgcctgtgtgcacacgccggtgcatggccaggtccgccggctgccggaagtccttgccgcacttctcgcagtggtatggcttcaccccttcatgggcgcgaagaagacgacggaagctcgaggggtcg

SEQ ID NO: 1195 - DNA, 341 bp, Homo sapiens
  misc_feature (1)...(341): n = A,T,C or G
aacatttcatcaatgtgatgtttgtaagaaaatttttaaaggcaaatcaagtctggaaatgcattttcgaacgcattcaggtgaaaaaccatacaagtgtcaaatttgcaatcagtcttttagaattaagaaaacattaacaaaacacctggttattcattctgatgcccgacctttcaactgtcagcactgtaatgcaacatttaagcggaangacaagctgaaataccacattgaccatgttcatgaaataaaatctnctgatgatcctctcagtacttctgaggaaaaacttgtatccttgccagttgagtactcatctgatgacaaaatctttcaaa

SEQ ID NO: 1196 - DNA, 281 bp, Homo sapiens
  misc_feature (1)...(281): n = A,T,C or G
ttnnagcggccnnccngccaggnaccccaaccagccnacaagantcngaaagnttttgntncacntacnttnccttcgcaccgtatcctnctcangnatagagcanttgtttttngnccgnntgntnggtnaaaccnncatnnaaaccctcatccgngatntgnnnctgcccngcagnagttnnaactgnccgtntntgncnantnaataaatnaataanataagaagggggagtgaancatanaaagaaanggcaaaagactgnnttgttagcttaattt

SEQ ID NO: 1197 - DNA, 312 bp, Homo sapiens
  misc_feature (1)...(312): n = A,T,C or G
gctgctcagcgccatctgcctcatctgcggagaccgccaggaccttgnagcaggggggccgggtggacattcttcaagaacccnttnttgaggccttaaagnctnacttccggaancgggagncccacccnccccanaatnttcccaaaatgttattgnaaaataactgacttgcaaancatcacccccaagggggttaaccggttaatcacnttgaagatggaaatcccggcttccntgccgcctttnatccaggaaatgttggngaacttaaaagggcctggacactcttaaccggacagccggggggtg

SEQ ID NO: 1198 - DNA, 545 bp, Homo sapiens
tcctcctcacctcattgtctccccgacttatcctaatgcgaaattggattctgagcatttgtagcaaaatcgctgggatctggagaggaagactcagtccagaatcctcccagggccttgaaagtccatctctgacccaaaacaatccaaggaggtagaagacatcgtagaaggagtgaaagaagaaaagaagacttagaaacatagctcaaagtgaacactgcttctcttagtttcctggatttcttctggacatttcctcaagatgaaacttcagacactttggagtttttttttgaagaccaccataaagaaagtgcattttcaattgaaaaatttggatgggattcaaaaatgaaatctcattgaacattcccaattacacaccacagatgaattttctttttctgaaaatttatttggtgttttaacagaacaagtggcaggtcctctgggacagaacctggaagtggaaccatactcgcaatacagcaatgttcaagtttccccaagttcaaccacagatttcctcgtcatcctattat

SEQ ID NO: 1199 - DNA, 121 bp, Homo sapiens
  misc_feature (1)...(121): n = A,T,C or G
nnnnnnnnnnnnnnnnnnnnnnnnnnnnnnnnnnnnnnnnnnnnnnnnnnnnnnnnnnnnnnnnnnnnnnggacngntcannatttcattgccnctcccaagctncttnntgntggttccc

SEQ ID NO: 1200 - DNA, 542 bp, Homo sapiens
cactatagggaatttggccctcgaggccaagaattcggcacgaggccggtccctaaccatggaggaccagatctcccttctcaagggagcggctgtggaaatattgcatatctcactcaacactacgttctgtcttcaaacagagaatttcttctgtgggcctctttgctacaagatggaggacgcagtccatgcagggttccagtacgagtttttggagtcgatcctccacttccataaaaacctgaaaggactgcatctccaggagcctgagtatgtgctcatggctgccacggccctcttctcccctggtttctgtatgcaaagctgatgggcctgctggctgacctccggagtataaacaatgcatactcctatgaacttcagcgcttggaggaactgtctgctatgacgccgctgctcggggagatttgcagttgaggcccaggcttgcatcctttccccagacccccagggatacactggcctggaaagggtacagcgctggaccccacacgggaaccagcaggaaggagcttggg

SEQ ID NO: 1201 - DNA, 121 bp, Homo sapiens; identical to SEQ ID NO: 1199
  misc_feature (1)...(121): n = A,T,C or G

SEQ ID NO: 1202 - DNA, 542 bp, Homo sapiens; identical to SEQ ID NO: 1200

SEQ ID NO: 1203 - DNA, 290 bp, Homo sapiens
  misc_feature (1)...(290): n = A,T,C or G
cgcgtccgaacaaagnaaaccacatgtttgttgtattggcataatcagtgacttgctcaaatgctattgctgttgcnagcatgtanactcnacccancactanacccacccnaggccgcatgnacnccnngccaccgatctgctcnggctcnctcgcccagtagggggcctnangccactgtacacnncagcnagacgcntatccncatccccaaacacncnaccancncnngagcngggcatatcccnattggnccannaccnatcagagagacttncacctacgccca

SEQ ID NO: 1204 - DNA, 234 bp, Homo sapiens
  misc_feature (1)...(234): n = A,T,C or G
cgaccccgcgtccgggggtnnaccgctgtgaggnntgcaaggncttnttcaaacncaccatccgcaaagacctnacatactcttgncgngacaacaangactgcacagtgnacaagcgccagngnaaccggtgncagtactggcgctattanaagtgnctggccactgncatgaagagggaggcggtcangaggagcgtcancnnnnaaaggacaaggatggggangngggagg

SEQ ID NO: 1205 - DNA, 436 bp, Homo sapiens
  misc_feature (1)...(436): n = A,T,C or G
caggcgctatgnctgcggggtggcggaacctgccaganggacnctaacatgcngngcaagtgccagcagtgctctngctgcncaagngcaaggaggcagggatgagggagcagcgcgtcctatatgaagaacagatccggaagaagaagatacggaaacagcacagcaggagncacaggncacagtcgcagtcaccatgaggnggccgcagggcagcagcagcncagccnttgggccnntgganctgangcaggcagncagggcncccggggaaggcgaagggtgnccangctaacagcngntnaagaacnaaatgatccagcangatggnnggnggacccaactgcaagngcaacaaaccgcnccttataccgaccagccaaaaaggaacgccctggncnctgngcngcagaacccccagtccccgagaatgccc

SEQ ID NO: 1206 - DNA, 285 bp, Homo sapiens
  misc_feature (1)...(285): n = A,T,C or G
tacgngaatttggccctcgaggccaagaattcggcacgaggctactggctccctcacccaggaccctgnccgctcttttggcagtgcgccacccagnctcagtgatgatnggntccccttcttctacatcatcgncatcctcttcatcctcctcctccttctataacgggagccccccaggaagtctacaagtggccatggaagacagcagccgagtgtcccccagcaagggcacaagcaacattaccaagctgaatggnatggtgctactgtgtaaggtgtgtg

SEQ ID NO: 1207 - DNA, 391 bp, Homo sapiens
  misc_feature (1)...(391): n = A,T,C or G
caggggggaaaagactagtttatttgttttataaaatanaatgagaaagcttagngtanatggtcaggaggagacagtcttaggngtcatcctcaccaanagcagcccagtacctttttaaatcatccctanaggacagacagggtagtatatttcctgacccctgcctggtcgcttgatttnttnttaaggaatccaaaanaaaaatactttcaattttggttactcttacagttactattcgcagactccctggaagcaacagctccatttggtttcttgtgtcccgagaaggaacagtaaacttanttcatagnggggngacctcanctcttcaaaggctgtgaccaattatttgagagttgtaatctgcagctccatttttaaaang

SEQ ID NO: 1208 - DNA, 554 bp, Homo sapiens
  misc_feature (1)...(554): n = A,T,C or G
tccgcactgggcactttccataccttctttccaggcgctagggcaggagaacagcatatcactgggggaaagcgtattggaatgagctttttacccttggtcttgccagtgctggcaagtgatgaacgtggcaactatattagcaacgtttgtcaactgtcttcacagtagccttcagcaagataaaatgtccccggaaaggaggaagtcgttgatggagcacatcttcaagctacaggagttctgcaacagcatggttaagctctgcatcgatgggcatgagtcgcctacctcaaggccatcgtcctcttcagtcccgatcgcccaggcctggagaacatggagctaattgagagatttcaggaaaaggcttatgtggaattccaagattatatcaccaggacatatccagatgacacctacaggctgtcgcgattacttctcagactgccccgccttgcggcttgatgaacgctaccattactgaggagttgttcttcaaagggctcattggcaacgtaccggatcgacagtgntatcccacacattttaaa

SEQ ID NO: 1209 - DNA, 324 bp, Homo sapiens
  misc_feature (1)...(324): n = A,T,C or G
tgcangtggatgctgnggagtacggctgccagccctgcgtgctgtgcccgcatccctcatctcccactcttcttcatgcgcctggtgggcaagacacccatcgagaccctcatccgggacatgcttctgtcagggagcacctttaactggccctatggctcgggctagtgatagtcaccttccaggacatacatggaaactggggccttgtggggaccctggggatcagggccccagcttctcttttgagactgatttctttttttaaagactgngaaatgtttgntttgntttattttttaaataatcatgaaaccaaaaaga

SEQ ID NO: 1210 - DNA, 848 bp, Homo sapiens
  misc_feature (1)...(848): n = A,T,C or G
tttgattttaaccccccntttcgactnctataggggaattgggncctcnaggccaaaaattcggcncgaggcgcacnaggaaaccttccntgccttttgccagctggcaantanactacaaacaggngntcaaaacaanggggttttntggnattgacctntgggacaagttaagngaactctccnccaagtgcatnnttaanactggggagttcgccaagcagttgcccggtttacnaccttnaccattgccgaccagaatnaccntcntcaaggttgcctgcctggacatcctnatcctgcggatcttgacgccgnaccacncccaagcaggacaccatgaccttntcgggacgggcttganccttgaacccggaccccanaatgcccaancncttggtttcgggcccccnnacccgacctgggtntttgcctttcgccaaaccaagttgttgcccctgganaatggattnatgcgnaaacgggggcttgttaaangccattttggcctaattttngggnaaccgccangnacctggaaacaagccggaacccggggtgggnanttnttgaaagaaaccccttgnttggaaggcccttaaaagggnnaacttgngggaaaacgggagggnccaaacccccccccaaattgttccccaaanaaggcttantgnanaattcntggancttgngnaaanaanttaanccccaaaaggggntnttaaccnggntgaaaancccnttaaaaagggaaanacccngggtttcattgccccccttttantcannaaaagtttggaaaaactaaaagggcctgggaaaatttttaacnggacaacccggggggg

SEQ ID NO: 1211 - DNA, 1030 bp, Homo sapiens
  misc_feature (1)...(1030): n = A,T,C or G
gtcgacccacgcgtccgggaaaacgcagatgtgccttcctggttggttgagatgctgatcctacagcactcccgctgtgcctcagcagtgagctgggtgtaaaggcaggaggcttgctggggtctgacacttccctgccctcctccaggagggacacatctggggctctatgaggaggacagctttcatcctgggctctggacttctctcatttgtggccttctggaactcagtgacatggcatcttcagagattttggggtgcttctggctacttttggcaagcccagtgggagaggctgctgactacatttgaagggaaggagtggatcctcttcttaataggtgccatccaagtgccttgtctcttcttctggagcttcaatgggcttctattggtggttgacacaacaggaaaacctaacttcatctctcgctaccgaattcaggtcggcaagaatgaacctgtggatcctgtgaaactgcgccagtctatccgcacagttcttttcaaccagtgcatgatatctttccccatggtggtcttcctctatcccttcctcaaatggtggagagacccctgccgccgtgagctacccaccttccactggttcctcctggagctggccatcttcacgctgatcgaggaagtcttgttctactattcacaccggctccttcaccacccaacattctacaagaaaatccacaagaaacaccatgagtggacagctcccattggcgtgatctcctctctatggccaaaccgatacccaaacaagccctccaaaattnatnacctattacaccaccccccattaanaaaaatgcacacacttttaaaatattnacncnttgnaaaaatgtgggaccaannataaaaaangggacnccnnantttancnatanataaaaanaantggggttttaaanttgngcccnntatatttatananncaaattntccnattttngggtannnaaanattntactnttantttagaccttttaagncnaaanaaaaaaaaaa

SEQ ID NO: 1212 - DNA, 340 bp, Homo sapiens
  misc_feature (1)...(340): n = A,T,C or G
ntctcctncgcataanccnggctttncgattgaagcactacacctgacaanccanaggaaacttcattccaaacattagaagaggtgcctgattatgtaaaaaaggcaactccatttttcatttctttgatgctgcttgaacttgttgtcagctggattctcaaaggaaagccaccaggtcgcctggatgatgctttaacgtcaatctcagntggngttctgtntcgacttccaagtctatttttcaggagcnttgaactgaccagctatntttatatctgggagaactacaggctgttcaatttgccttgggattctccatggacttggtattcagcct

SEQ ID NO: 1213 - DNA, 2225 bp, Homo sapiens
cgtccaccccctttttatcttttttttttttttcatgaagaccagtttattttacatgcttgctttcacattctttactgggaatttaaggccttttttcagccttaacttgtataccaacctcaaggattttgtttgatacagaaaaggatagggctgggccttctgccaaggactgataacctgcctgccaaaaggaagagggaatgaaagccttttgtccttctaggccccttacagtacctcaaaatctaaaggccttaaaggggaaaaaaaccgtatctgttctttctccttatctcctacccttctctttaagcatattgaagatggacttttttccaaatgtttatttgtaggaagaggtgatgagtgcaggccagcagctgagaacttacagctttgatgcaccaggaactgtattcaagctgagggcaaaagcctcctagggagggaagccaggtccaccaaggccagagacagacaggcgagactgtggaaaggcccagggaaatgctgccctggtaaagtgcctcaagctggcctactgggccaagtccctcctggggttcctagagctgataggaagaaggagtcccattttgatagtcctgccctggagacttggacctagctgatactaaggtattttataaagctacagtggatgtttttcttaagagaactgaaagttggaaaaggcacaagtatatataagaatttagtaaaatgataatggtggtctttcaaatcaaagagtgatctttaaattgttcttgggaaccacagggttcctggccatgtctggcggctgagaggaggccaggatggggacttcaacccaagcagctgtggttttgcctttgataaggttcctggtaaaaatcatcttgaataaatgttgctgagaaactggtaaagcattcgggggagaaaggattttgctctttgctctgccatgtttttccgggctctttcttcggggagaaagagggctctaacctttggtcctcattcagataggctaattaggggtctcgggtgtccccaaagggcagcaactttgacccctccccttgtgggtaaaagggcttttcacagtttcccagcagttggtttttggtttccacataaggctaaaggtgttaaagtttggtctgcacctcgttggttttaatccagggaggagctcctggatttctttttctcccccacagagggaaaccttttgtttgcggtgggccagagttaaaaacggggcctttaccactcactcagagtgtttggtgtgtgtatgtttgtgtgtgtgttgggtaaagtggcgactggcatctggtatgtcatgaattgagacctataatgatttgccagggtgtcttggctctggcctgagtcgggtatgtgaaagccttttggggcaggaaggggcaaagtgatacctggccgtcccaccctctggtcccagaaggagctctcgctggagccaggcagcctccagtccccctcctttcagccttgtcattctctgcatcctgcccaggccacaaaggagttatctggggctgaacccctctccttccacagcagaggaccaggggtctcctccctctgaccagcctccagtctggggagctgtgttttcctttttcttaagctaactcctgatcccattgagggacatcaagggcagtagtttgaagaaagcctcatccttggccctgcttttccgggaagccgaccttccctctaccctggtggtgccatcattagggcgtgtggccgaagaggcaaattgttaggtgcaatcaggaagccgtgtctgcatcccatggctgagggacagccaggatgacacttaggctgtctctcactccatcctctttggggagtctgggatgctctcagagagcggggtgaagcccagcaggaggacatgtctctcgtaggccttggtctgcttgaacatggtgtcagtcccatggaggtggtccagcacacccagcaccccatagcactggttgaacctgagatggtggtagtcgtggaattcaggcgaaggcaggaagggaaggtggtagccacagtgggagatggtggtgatgatgagggccaaggaaaaccacatggtgatggaggacaagtgggcagccattactaactgggcccactatcaccggtagcatgttggagactgcatgctctatagggtgggcatagagagagat

SEQ ID NO: 1214 - DNA, 2724 bp, Homo sapiens
  misc_feature (1)...(2724): n = A,T,C or G
atggagctcgtgggcgacgtgttgagagacacgctcagcgaggaagaggaggacgactttcggctggaaggtattcggagtccattgctctcttcccagcagcagcgagtgggggaagcgggtgttcagctggccgtgtgccctgtgtactccagaaaatctgcagatggagggcacaacagggaccttgtgactctgggtgggggtggactagagggtgggatggaggagaggagtaagagacaggtgtggtacttcataggtccaagcccagcacttctttgccagggttattgtgaagacaatgaggtgatggatgtaggtcgcaagggtggccctggtacagattgggttcaagatgcccatttaacatccaaggagaggtaccgaggaggccgtgggatacctggtgattggagcttggggttcaaggagcagttgggcaagaaacagagagagagagcgagtcaagacttctcaggaagtagccacggacattgcccgggactctcgggcaaggctcctcaatacacagggctggcggtggcttcccaggaaggctgggaggaagaggagttcatgggaaggcagcagggacccccagatggaggggcagagcaaaacttgcagtcacttgtagataccagcacgtgggatctggttagtcaaggtggtggcccactgcctctttactccggggctatgggcaggctgcaggggttggtctacaggtgtgatgagatgctccagagcattccccaggcaagaaggctgcttgatcttgccacggtgaaagcgaatggattggctgccttccttctacaacatgttcaggaattaccagtcccattggccctgcctttggaagctgccacatgcaagaagtatatggccaagctgaggaccacggtgtctgctcagtctcgcttcctcagtacctatgatggagcagagacgctctgcctggaggacatatacacagagaatgtcctggaggtctgggcagatgtgggcatggctggacccccgcagaagagcccagccaccctgggcctggaggagctcttcagcacccctggccacctcaatgacgatgcggacactgtgctggtggtgggtgaggcgggcagtggcaagagcacgctcctgcagcggctgcacttgctgtgggctgcagggcaagacttccaggaatttctctttgtcttcccattcagctgccggcagctgcagtgcatggccaaaccactctctgtgcggactctactctttgagcactgctgttggcctgatgttggtcaagaagacatcttccagttactccttgaccaccctgaccgtgtcctgttaacctttgatggctttgacgagttcaagttcaggttcacggatcgtgaacgccactgctccccgaccgaccccacctctgtccagaccctgctcttcaaccttctgcagggcaacctgctgaagaatgcccgcaaggtggtgaccagccgtccggccgctgtgtcggcgttccccaccaagcacacccgcaccgagttcaacctcaagggcttctctgaacaagggcatcgagctgtacctgaggaagcgccatcatgagcccggggtggcggaccgcctcatccgcctgctccaagagacatcaaccctacacggtttgtgccacctgcctgtcttctcatggatggtgaccaaattcaaccaggaactgttgctgcaggagggggggtccccaaagaccactacagatatgtacctgctgattctgcagcattttctgctgcatgccacccccccagactcagcttcccaaggtctgggacccagtcttcttcggggccgcctccccaccctcctgcacctgggcagactggctctgtggggcctgggcatgtgctgctacgtgttctcaagcccaacagctccaggcagcacaggtcaagccctgatgacatttctcttggcttcctggtgcgtgccaaaagtgtcgtgccagggantacngcgcccctggaattccttcacatcactttccagtgcttctttgccgcgttctacctggcactcagtgctgatgtgccaccagctttgctcagacacctcttcaattgtggcaggccaggcaactcaccaatggccaggctcctgcccacgatgtgcatccaagcctcggagggaaaggacagcagcgtggcagctttgctgcagaaagccgagccgcacaaccttcagatcacagcagcctttctggcaggggctgttgtccccgggagcacttgggcctgctggctgagtgccagacatctgagaaggccctgctccggcgccaggcctgtgcccgctggtgtcttggcccgaaccttcgcaagcactttcactccatcccgccagctgcacccggagcgcttccagctcctcaagggttttacctttggtttccgggacaaatttccacataaacagtgctgccagaacgcccatacaaccgtaaatccagtaggagaaaccgttgtggaaatgggccaccagccaggagtttttgtccatcatcgggaaggtccaggagacgaagtagttcgccagccactgggccgccaccgcgattgccagcgctttaccacgaatagcattcgggaagatttccgacagcagtacccagcataccggaccccaggacatggcaaaggcggcaacatagaacagcatcgacagtag

SEQ ID NO: 1215 - DNA, 2724 bp, Homo sapiens; identical to SEQ ID NO: 1214
  misc_feature (1)...(2724): n = A,T,C or G

SEQ ID NO: 1216 - DNA, 2965 bp, Homo sapiens
gcctacaaccacccccatactacaccgcaaaagccatgcaaggaaaccgctgagctcgtgggccgtgttggggaggacgtcaagcctggtactgggcatcatggccaagctgctgcctctgcgggctctgcctctgctcttcaacctgatcaaggtggttccacgagtgtttgggcgcatggtgggtaaaagccgggaggcggtggctcaggccatggtgctggagatgtttcgagaggaggactactacaacgatgatgttctggaccagatgggcgccagtatcctgggcgtggagggcccccggcgccacccagatgagccccctgaggatgaagtcttcgagctcttccccatgttcatgggggggcttctctctgcccacaaccgagctgtgctagctcagcttggctgccccatcaagaacctggatgccctggagaatgcccaggccatcaagaagaagctgggcaagctgggccggcaggtgctgcccccatcagagctccttgaccacctcttcttccactatgagttccagaaccagcgcttctccgctgaggtgctcagctccctgcgtcagctcaacctggcaggtgtgcgcatgacaccagtcaagtgcacagtggtggcagctgtgctgggcagcggaaggcatgccctggatgaggtgaacttggcctcctgccagctaggatcctgctgggctgcgcacactcctgcctgtcttcctgcgtgcccggaagctgggcttgcaactcaacagcctgggccctgaggcctgcaaggacctccgagacctgttgctgcatgaccagtgccaaattaccacactgcggctgtccaacaacccgctgacggaggcaggtgttgccgtgctaatggaggggctggcaggaaacacctcagtgacgcacctgtccctgctgcacacgggccttggggacgaaggcctggagctgctggctgcccagctggaccgcaaccggcagctgcaggagctgaacgtggcgtacaacggtgctggtgacacagcggccctggccctggccagagctgcccgggagcacccttccctggaactgctacacctctacttcaatgagctgagctcagagggccgccaggtcttgcgagacttggggggtgctgctgaaggtggtgcccgggtggtggtgtcactgacagaggggacggcggtgtcagaatactggtcagtgatcctcagtgaagtccagcggaacctcaatagctgggatcgggcccgggttcagcgacaccttgagctcctactgcgggatctggaagatagccggggtgccacccttaatccttggcgcaaggcccagctgctgcgagtggagggcgaggtcagggccctcctggagcagctgggaagctctggaagctgagacactggctgcaggcacctagctatgtgaccacttggccctaaaaccctatccataaatccccacatccctttacactgcaccctccacaaatattcctaccaagcaaagaggaagacaaaagttcatacctccacccacagcaggagctgggcagggctgggcatgtggtgtgcagggtggacccaggcacctctgcccagcgccagggtcttcaggaaggagacaggatcctggcggtgaacaatgatgttgtggaacacgaagactatgcggtggtggtacgccgcatccgggccagcagccctcgggtgttgctgacagtattggcacggcatgcacatgacgtggcccgagctcagctgggagaagatgcccacctctgtcccaccctaggcccaggggtccggccccggctgtgccacatagtgaaagatgagggtggttttggcttcagtgtcacccatggcaatcagggtcctttctggttggtgctaagtactggaggagcagctgagcgggcaggggtgccccccggggcccggctgctggaagtgaatggggtcagtgtggagaagttcactcacaaccaactcaccaggaagctttggcagagtggacagcaggtgaccttgctggtggcagggccagaggtggaagaacagtgtcgccagctgggattgcccctggctgcacccctggcagagggctgggcactgcccaccaagccccgctgcctgcacctggagaaagggccccagggttttgggttcctgctccgggaggaaaagggccttgacggtcgccctggacagttcctgtgggaggtggacccgggactgccagccaagaaggctgggatgcaggctggggaccggctggtggctgtggctggggagagcgtggaggggctgggccatgaggagacagtgtccaggatccaggggcagggctcctgtgtctccctcactgtcgtcgaccctgaggcggaccgcttcttcagcatgaatagcctgtccccactccttttcttggagaacacagaggctcccgcctcgccccggggcagcagttcagcctcagtggttgagacagaggacccttcactggaagacacaagcgtgcattctgtccttcttggctcccgacagtgcttcctgtaccctgggcctggtggcagctatggcttccgactcagttgtgtggccagtgggcctcgtctcttcatctcccaggtgactccaggaggctcagctgcccgggctgggctgcaagtgggagacgtgattctggaagtgaacgggtatcctgttgggggacagaatgacctggagaggcttcagcagctgcctgaggctgagccacccctctgcctgaagctggcagccaggtctctgcggggcttggaagcctggattccccctggggctgcagaggtgaggaagaagaaacagatgggactgcccacctgccagcagagggtgtggttggaggcctcagacaggtccctgaaggagtctgaggctccagaggatgtcatatgggagttttag

SEQ ID NO: 1217 - DNA, 535 bp, Homo sapiens
tgaagtcaacccacgcgacctgcccccgttgactgaccgctaccgcagggcctgccagagcctggggcaaggggagcaccaacaggtgctgcaggccgtggagctccagggcttgggcctctcgttcagcgcctgctccctggccctggaccaggcccagcttacacccctgctgcgggccctcaagctgcacacagcactccgggagctgcgcctggcagggaaccggctgggggacaagtgtgtggctgagctggtggctgccctgggcaccatgcccagcctggccctccttgacctctcctccaatcacctgggtcccgaaggcctgcgccagcttgccatggggctcccaggccaagccaccttgcagagtttggaggagctggacttaagcatgaaccccctgggggacggctgtggccagtccctggcctccctcctgcacgcctgccccttactcagcaccctgcgcctgcaggcgtgtggcttcggccccagcttctttctgagccaccagacagcactgggtaag

SEQ ID NO: 1218 - DNA, 1492 bp, Homo sapiens
  misc_feature (1)...(1492): n = A,T,C or G
gctccgagacccagcagcagctctgtgtccagctggaatttcctcgccaggaagagaatccagaagctgtggcactcaggttggctcactgtgaccttggagcccaccacagccttcttgtcgggcagctgatggagacatgtcccaggctgcagcagctcagcttgtctcaggttaacctctgtgaggacgatgatgccagttccctgctgctgcagagcctcctgctgtccctctctgagctgaagacatttcggctgacctccagctgtgtgagcaccgagggcctcgcccacctggcatctggtctgggccactgccaccacttggaggagctggacttgtctaacaatcaatttgatgaggagggcaccaaggcgctgatgagggcccttgaggggaaatggatgctaaagaggctggacctcagtcaccttctgctgaacagctccaccttggccttgcttactcacagactaagccagatgacctgcctgcagagcctcagactgaacaggaacagtatcggtgatgtcggttgctgccacctttctgaggctctcagggctgccaccagcctagaggagctggacttgagccacaaccagattggagacgctggtgtccaagcacttagctaccatcctgcctgggctgccagagctcaggaagatagacctctcagggaatagcatcagctcagccgggggagtgcagttggcagagtctctcgttctttgcaggcgcctggaggagttgatgcttggcttgcaatgccctgggggatcccacagccctggggctggctcaggagctgccccagcacctgagggtcctacacctaccattcagccatctgggcccaggtggggccctgagcctggcccaagccctggatggatccccccatttggaanagaccagcttggcggaaaacaacctggctggaggggtcctgcgtttctgtatggagctcccgctgctcagacagatagacctggtttcctgtaagattgacaaccagactgccaagctcctcacctccagcttcacgagctgccctgccctggaagtaatcttgctgtcctggaatctcctcggggatgaggcagctgccgagctggcccaggtgctgccgcagatgggccggctgaagagagtggacctggagaagaatcagatcacagctttgggggcctggctcctggctgaaggactggcccaggggtctagcatccaagtcatccgcctctggaataaccccattccctgcgacatggcccagcacctgaagagccaggagcccaggctggactttgccttctttgacaaccagccccaggccccttggggtacttgatggccccctcaagacctttggaatccagccaaagtgatgcacccaaatgatccacctttcgcccacaactataaaacactcaagaaataacacaacctccatgaaccccaattttctcatctgtgaaatggg

SEQ ID NO: 1219 - DNA, 422 bp, Homo sapiens
acttaagatccaacgaggaggaggaaggcgtgtgctgtggcaaggttcacaggctgcagcctcagccaggagcacgtagagtcactctgctggttgctgagcaagtgtaaagacctcagccaggtggatctgagtcacaacagcatttctaggaaagtgccctgtacctgtggacactgccctcctgcccacgtgtccgggaggcctcagtgaacctgggctctgagcagagcttccggattcacttctccagagaggaccaggctgggaagacactcaggctaagtgagtgcagcttccggccagagcacgtgtccaggctggccaccggcttgagcaagtccctgcagcttgacggagctacgctgacccaagtgctgcctgggccagaagcagctggccatcctcctgagcttggtggg

SEQ ID NO: 1220 - DNA, 1492 bp, Homo sapiens; identical to SEQ ID NO: 1218
  misc_feature (1)...(1492): n = A,T,C or G

SEQ ID NO: 1221 - DNA, 422 bp, Homo sapiens; identical to SEQ ID NO: 1219

SEQ ID NO: 1222 - DNA, 374 bp, Homo sapiens
  misc_feature (1)...(374): n = A,T,C or G
agggcccagcatgagccggagggagggaagtctggttggaatgggacagagggctgatggggtcaggaacaaagagccagcgtgggagaggtgatcaatgagcaggaggttggccatcctcattcctcccccctttcccaccagaagacccccagactgattcctcagtctcacttcttccccactttggaggccaagatccgtcagacacacagccttgcgcacctcctcaccaaatacncttgaagcaacttgcttccaaggaatnttgtgcagcttcaagggagaccccctttcgggcttgcccagctttttcgcccgccncngcttgccggtggcccngccttgagcccccngcttccaancccaccccg

SEQ ID NO: 1223 - DNA, 583 bp, Homo sapiens
  misc_feature (1)...(583): n = A,T,C or G
ggcgggcggcgcgcgcggctgcggggctccagggcccgccccgcccgcaggtgctatgctgtgggccccgctcaggtggatgcagaccaagttatcctctctcacagccccatgaagctcttctccgagtaccatgagaagcggatgctggtgtctggacaggggcccgtgatggaaaatgcccagggaaaggcatcttccccaagaactgtccagcattacttcctgagcttgctccanactgggcttccgaaatgtcgtcaccgtggatgagctgcggatggcctttcctctgcttgacatggtggacctggagcggcggctaaagaccacgcccctcccgaggaatgacttcccccgcattgaaggggtgctcctcctaggggagccggtccgctgggagaccagcctgcagctgatcatgggatgtcctcctcagcaatgggagccctggggctggcctggcaacacccccctacccccacctccccgtcctagccagcaacatggatctcctgtggatggctgaagccaanatgcccaggtttggacatggcacctttctgctgngcctggaaaccat

SEQ ID NO: 1224 - DNA, 539 bp, Homo sapiens
  misc_feature (1)...(539): n = A,T,C or G
ctgaagtcagaatgggagccctcaggaatctccttcctgggccctgggccttgtgcacccagggtggatgggggtgctcctcctaggggagccggnccgctgggagaccagcctgcagctgatcatggatgtcctcctcagcaatgggagccctggggctggcctggcaacacccccctacccccacctgcccgtcctagccagcaacatggatctcctgtggatggntgaagccaagatgcccaggtttggacatggcacctttntgctgngcctggaaaccatttaccagaaagngacgggcaaggagctgagatacgagggcctgatgggcaaacccagcatcctcacttaccaagtttgcccgaggaccttgatcangcgacaggccggagaggcgggggctgggcccgcccccatccggaagctctatgctgtgggtgataccctatttttgacgttntacnggccccaccttttcnaccagttccttgcaanaaggcaaccncattgatgggggccccaagaactanggggcc

SEQ ID NO: 1225 - DNA, 484 bp, Homo sapiens
gaccacgcgtccgggggctgtgtggctgcgctcggcgcggcgcgtgggctttgctggcgggcggcgcgcgcggctgcggggctccagggccgccccgcccgcaggtgctatgctgtgggccccgctcaggtggatgcagaccaagttatcctctctcacagccccatgaagctcttctccgagtaccatgagaagcggatgctggtgtctggacaggggcccgtgatggaaaatgcccagggactgggcttccgaaatgtcgtcaccgtggatgagctgcggatggcctttcctctgcttgacatggtggacctggagcggcggctaaagaccacgcccctcccgaggaatgacttcccccgcattgaaggggtgctcctcctaggggagccggtccgctgggagaccagcctgcagctgatcatggatgtcctcctcagcaatgggagccctggggctggcctggcaacacccccctacaccc

SEQ ID NO: 1226 - DNA, 718 bp, Homo sapiens
tccaccccgcgtccgcggcgacggccggatggctgcgtggggctgtgtggctgcgctcggcgcggcgcgtgggctttgctggcgggcggcgcgcgcggctgcggggctccagggccgccccgcccgcaggtgctatgctgtgggccccgctcagagcccacccacctttgggttcctgttggacatcgatggagtgcttgtgcggggccacagagtgatccctgctgctctgaaagccttccgaaggctggtgaactcccaggggcagctgcgggtgcccgtggtttttgttacaaatgctgggaacatcttacaacacagcaaagcccaggagctgtcagccctgctggggtgcgaggtggatgcagaccaagttatcctctctcacagccccatgaagctcttctccgagtaccatgagaagcggatgctggtgtctggacaggggcccgtgatggaaaatgcccagggactgggcttccgaaatgtcgtcaccgtggatgagctgcggatggcctttcctctgcttgacatggtggacctggagcggcggctaaagaccacgcccctcccgaggaatgacttcccccgcattgaaggggtgctcctcctaggggagccggtccgctgggaaaccagccttcaactgatcatggatgtcctcctcaacaatgggagccctggggctggcctggcaacaaccccctaaccccaactt

SEQ ID NO: 1227 - DNA, 1491 bp, Homo sapiens
ttgactgtagcttagtcacatggccacgcctcgctggcagggaggcaagcgaaggtctttttcacacctagtggcaatatggtcagctgaaaatggacaccagcaaagaaggggagaagcgcaaccgtagtctgcctcagctctacagcaggatttaagctctggagtcagactgagttgtaatcctagctctgccctcttgaacaagttacttaatcttgctgtgccttggtttcctcgttttacaaatagcgtcatctcatagagtttttctgagagggaaatgtgaaatgctgcctcccagtgcctgcacagtgtctgctacaagccaaccattaccctcctcaaaagcaatgtcagcccttttgctgcccagacaacaccaccccacccccacctacaagacccagggagaaaaataaaactcaacttgatgccttaatccaatactcccaggtttggacatggcacctttctgctgtgcctggaaaccatttaccagaaagtgacgggcaaggagctgagatacgagggcctgatgggcaaacccagcatcctcacttaccagtatgccgaggacctgatcaggcgacaggcggagaggcggggctgggccgcccccatccggaagctctatgctgtgggtgataaccctatgtctgacgtatacggcgccaacctgttccaccagtaccttgcagaaggcaacgcatgatggggcgccagaactaggggccgggggcacacggcagcaacagccctcagcaagccagagctgcatctccatcctggtgtgtacaggcgtctacaatcccaggaacccacagtccacggagcctgtccttggaggaggggagcctccattccacgggcaccgagacttatgcttcagtccagggctcatggaggcctcccacgtggtgaatgacgtgaatgaggctgtgcagctggtcttccgcaaggagggctgggctttggagtgagggcagtgcggtggaggtgagggggtgagcctggacctgtgggcgagtcccattggctgggctctggcctgatcactgggctcaggtcagggcttggttcccttgccacccttcttgctgccccatgagtgtggcattactggtcacttggaagaagacagtgactctttttccctgctgggtagcattttgtatggaacggttggaattttctgggcccagttcccacgtgcctttcgtggcagtctaacctcaggccattctcttcccctgtgtgcctcagtgtccttctcatttcagtagggacttctgaaatgggggaggcagtgtggaatactgtggatgtctgtgcagagcctttgccggcactgaaggcatgcagcctgtcggcagagtgtcttaacaccagatgctactttttactgtattgtagtttattgcccggagatgtggggctttttttttaaataaaataatcataataaatgttcatgatgctgaaaaaaaa

SEQ ID NO: 1228 - DNA, 518 bp, Homo sapiens
  misc_feature (1)...(518): n = A,T,C or G
ccccgcgtccgcggacgcgtgggaaagatttccttcactacaagcttacaaaaatatttatttttattttctagtatttttaaatgttttctattttctatttaaatttttaaccaactggagtttatttggagctgaagtatgaggcccattttatgtttctttggaactatggatgtgttctttctcactagcttttgcatcctttaaattctagatatttactgtttctcttagcagtgtgaggttaatgatgttatacctaaaattttttgatctctaacagtgctgctgatactactttttgttttttaaaggaactttgtgctttaatgttttccctggattggattaaagcaaaaacagaacttgnaggccctgctcatctgatcatgaatttgggggattccggnctntnctagttgaaangggttttttttttaacctgaaaaatttnggcttaaaanggaacccaatttttttttnccctttaaatnncaaaatttaaaggggggggg

SEQ ID NO: 1229 - DNA, 253 bp, Homo sapiens
  misc_feature (1)...(253): n = A,T,C or G
tngggagcggccacccaaacanntcaaaaacatccaattctcaaactgaagctcgcactctcncctccaacataaaagtctctgccncccttctgtgcctgctnctcataacaaccaccttcattccccaagggctcnctcaaccaaatncaancagggccccantcacctgctgttataacttnaccaatangaaaatctcantncanangctcccnagctataaaanaatcaccancancaantntcccaa

SEQ ID NO: 1230 - DNA, 393 bp, Homo sapiens
  misc_feature (1)...(393): n = A,T,C or G
ccacgcgtccgcagctccttgccagctctcctcctngcacagncgctcgaaccgactgctgagccccatggnccagtgccacggctntccgacgnccccagtaatcccctggctcctgcgggtggccgctgctgctcctgntnctggtggccngcagncgncncgcaacaagagcgcccntggccactgaactgnnctgccagngcttgnagaccctgcagggaattcacctcaagaacatncaaagtgtgaaggtgaagtcccncggaccccactgngcccaaacctaagtnatagccacactcaanaatgggcagaaagcttgtntnaaccccncatgagaccatggntaagaaaatcatgcnaaaagatgctgaaaaatggcaaatccaa

SEQ ID NO: 1231 - DNA, 491 bp, Homo sapiens
  misc_feature (1)...(491): n = A,T,C or G
cncgcgtccgctntatcctngtggctgcnnttggnnccnnggctggcctcatacnagaaatgnaaaangangancgtcnntntaaccctncaatnnttcatnagggcttntgggacncttgttcnnactgctgctnctntnatgccncacagatccnatgnnaaagatntatatattatttccccaccactgnngggtgcatcaagccgggcatcatctttatcagcntgangggaacccagagtctgtgccnaccccancgatcggagagtncaggaggtgcctaatgcaccctgaancaaggcccaagatctgggaacaaggtcatnagcttgacaaggagggcacggcattgcnncccactttnttntgtctnccccagcgaccgnctgnctaggagaccttgtttntatagntattnaaagcatntattcttntnttcaggtttagagcagtcaacagtattcatgtgtactccgactgacacggtt

SEQ ID NO: 1232 - DNA, 192 bp, Homo sapiens
  misc_feature (1)...(192): n = A,T,C or G
cgccaaggcaggggtngtgctgntcctggnnctgaccgnactctgcctnagngncgggnagcctcttagttctgagcttcaaatgccnatgccanttcttngaaagccntnttgccaganccaangtgaagcatcttaaaattcttaacactgcaaactgngcccttnatattgtagcccngctgaagaaca

SEQ ID NO: 1233 - DNA, 1227 bp, Homo sapiens
  misc_feature (1)...(1227): n = A,T,C or G
caggctctgttggaggaantccaacgtttcctntccctaaaccgctccctcaangagtggggttcaaantgcattcctgcctgcttgctctgctcccccancaaggattacttcttccanacaccccccaaatgcttgcctctctcttctaaaggaagtagaagagggaacctggaacccttgggaatgccacagcttcccagaataccccagctgggcatgctttgtctgtcaacctcattttcccacgtgttaaagggcattagcatagtggctacagtgtagaatgtgtatgaactgcaggggctgtagcgtggaatgtgggctccagtcagctctgagctgctgttggggcaaagcgtcatggacagcctcatgggaagctctagacagaaaccccactcagagcccagagcccccttaccttggtagcagagatgcagttgatactacggttatttctaaatcttacaatccctgctgtgacgcgatgcactttctctagatagtttacccttcaaaanccnaaaaacangtnccantnnatncncatttncttnnnactttcctnnttataaaannnnaantccctcaggctgaatgctgaatgccacagttcatctgaggtggagggttcccctccagaccacaggcatttgcgtctcagccgagggaggactangcgacacaggggatggagtgggccccaaacctcatgctagcaagccaggccagcttggctgcagagcatgcgagcantacccccacaccatatcanaatggctgtctagaatctgggcatcaccagccccctgttttccttatancctgnagacgacacancacnnacgcttctgttctgaccgaaggaaaaatgggtccnagacccatgaacatctggatcacaagctgctgccctcactaaaaattgtggccattttgaaaaaaccgggtggaaccatnttgacaccttgggatcacctttggccccttaggggaattttccccatctncccttaacaaanccctgaaatccnccccttttggnancaaccttnncttttggaactnaattactanttttcccaatnaaggcccnngggggaaccnttnggggaacttcccannnaancccccggcnnccntttaccggntttnttctntttttnantttccnaagccccnngattccngggntttacgnntaaacccncnaaanctttgtaa

SEQ ID NO: 1234 - DNA, 400 bp, Homo sapiens
  misc_feature (1)...(400): n = A,T,C or G
caggaaacanccaattctcaaactgaatctcgcactctcgcctcnancangtaaagtctctgcgcgccctnctgtggntgcntgctcatagcatccggnntcntnccccaaaggctcnctcacccaccatgcnatctatgccccantcacntgcngttntgncttcaacnatatgaanatctcngtgcncangctcncnanctatngaacaatcnccnccntcnnntgtcncntagaatctgtgatcttcaagaccnttgtgggnaagagatatctgtgntgaccccaagcagaantgggtgtcaggattccanggaccaactgggacaaggcaaancccnactcccaagacangaacacnccctcncccncccaagantctncngctaacttattttcc

SEQ ID NO: 1235 - DNA, 445 bp, Homo sapiens
  misc_feature (1)...(445): n = A,T,C or G
gcgtccggcccaggccgctccttgcctgcnntcctcctcgcacagccgctcgaaccgnctgctgngccccatggcccacgccacgctctgcgccggccccagcaatccccggctcctgcgggtggcgctgctgctnctgctnctggtggccgccagccggcgcgcancacgagcgcccctggccactgaactgggctgccagngcttgcagaccctgcaggganttcacctcaagaacatccaaagtgtgaaggtgaatgtcccccggaccccactgcgcccaaaccgaaggnatagccacactcannaatgggcagaaagcttgaactcaaccccgnatcgcccanggttaacaaantcatcgnaaagatgctgaaaaatggcaaatccaactgaccagaaggaaggaggangcttattgntggctgnncctgaagggaggccc

SEQ ID NO: 1236 - DNA, 214 bp, Homo sapiens
  misc_feature (1)...(214): n = A,T,C or G
ggacagagccccaggccagagaactctctggagcgngaggngatggatnccgtgccancgcacacggatgccttncaggactgngggcngggcagcatggcccangtttntgtggtccctgtntcctnanaagggaccccaancagggagccagtgncttcangcaagntggacccctaaggctgaangaacccanccatgccnaccatggacc

SEQ ID NO: 1237 - DNA, 188 bp, Homo sapiens
  misc_feature (1)...(188): n = A,T,C or G
ccgcggtggcggccgaggtctgaaacatncaattntnaaactgaanttnncactctcgcctccagcatgaaagtctctgccgaccttctgtgcctgctgntcntagcatccanctnnattncnnaagggctcgctnagtcagatgcaatnanngccccagtcacctgctgtnatcacttcaccaatag

SEQ ID NO: 1238 - DNA, 912 bp, Homo sapiens
  misc_feature (1)...(912): n = A,T,C or G
tcgagttttttttttttttttttgacttgaaaaaaagatgttttaataaatacaaaaaaaaatctctaataatgacttctgctcagctcaggggtancaggaatggtgtnagggaacccttggtgctgaagtgaggataaattaaagaatcccaataagccagtggtgttctgtacagaagaaaagagttaagcttgtgggacagaggccaaaagaaaacagggcaggagttcgcatggatatggccttggtctgacccagcagtctttccccttgtagacttgtggttcccagaggtagtgggggaggagaagaagcagagcagaggcacgaaaggcactgggttcccacaggagagtcggggtcctcagcaccactccttctcccagctcaggcccatcctcttggtcatatggccttctggatgctccctaggagtgctccgcttctttctccagctctggaagggttctagtctcagaggacctttgggctgtgcagtgggaacagcatcgactctccttccctgagccacaggatagcggcggtgaacaatcgtcccgctcacagtggggtacccctgccccacatctgcaggtaatacagcttcatctcccccaaaggggggcactgatgggtgccagctctgattctctgggaaccacttgcccagcaaagcgacacccccgaggcccatcagcctgcatggggtctcccagcttggcattagtccctgaccctactggacactgtttgcagcagtcggtggggttggcacggacaggctgagcacaggccaggcgaggacactgcaccttctcacagtgcacctctcccgtggcccccttgcaggtgcagacagcacacttaattaggccaaaaggctcgtgccgaattcctgcagcccggggg

SEQ ID NO: 1239 - DNA, 912 bp, Homo sapiens; identical to SEQ ID NO: 1238
  misc_feature (1)...(912): n = A,T,C or G

SEQ ID NO: 1240 - DNA, 458 bp, Homo sapiens
atcatgaaactcaatttaagaataaggttataggagaaaatgacattacactccactgtgttgatcagatttatggagtgtttgatgagaaaaagaaaactctctttggacaactgaagaaataccctgagaagctcatcatccactgcaaagaccttcgagtgttccagttttgtctgaggtacacaaaggaagaggaagtcaaaaggattgtcagtggcataattcatcatacccaggctcctaaactgcttaaacgattatttctgttttcctatgcgactgctgcacaaaacaatacagtcactgatcccaagaaccataccgtaatgtttgacacacttaaggactggtgttgggaactggaacggaccaaaggcaacatgaagtacaaagcagtggagtgtcaacgaaggctataaagtctgtgagagattgccagcatactttgttgtccc

SEQ ID NO: 1241 - DNA, 277 bp, Homo sapiens
  misc_feature (1)...(277): n = A,T,C or G
ccggnacanggtgccgntgacccgaggcgtgcanagactccaganttggnggcntgatgaagactctgctgctgnttgtggggctgctgctgacctgngagagngggcangtcctgngggaccagacggtctcacacantgagctccannaaatgtncaatcagggaagnnagtacctcaatnangaaattcaaaatgctgtnaacggggtgaaacagataaagactntcatnnaaaaaacanncgaagagcgcaagacactgntcagcaacctaga

SEQ ID NO: 1242 - DNA, 257 bp, Homo sapiens
  misc_feature (1)...(257): n = A,T,C or G
aggacagtgtgacaagtgccggggganctngnatgtggacngttccaccaacaacccctcccaggctaanctgcggcgggagctcgacnaatccctccagggcgcgngggaggttnaccanggaaatacaaacngagctgctaaaagtcctaccaantggaangangctcaacaccnccnccttgctgggagcagcctggaacnnaagcangtttaacttgggngtgtcccggcttggcaanaccctcacgcaaagg

SEQ ID NO: 1243 - DNA, 649 bp, Homo sapiens
  misc_feature (1)...(649): n = A,T,C or G
aacggggtgaaacagataaagactctcatagaaaaaacaaacgaagagcgcaagacactgctcagcaacctagaagaagccaagaagaagaaagaggatgccctaaatggagcactcaggggaatacagcagcaccaacatgtcttgnacagaggagtcattcncccangtgaaagtttgatggccaaaatgggangganccccaatggcaatggggnctccccttccttggggggganaaggnaggctgggttaatnggacccccctttggacccccttggnaaaanaacccaagtaaccccttngggcccaannttgggaaanaangggtttttcccctttnaaccgtttcntaaacccgggccccgcattnccnnttnggncccccaagggttnanaaaaggggctttngggggggacccnnttttcccaaanccgggnggcccccctttttgggnngattntttagggggggccntnccgggcccccccaaaggggccctttnttggntaaanggggggaaanggnntttttcccccctttggggaaaaacccnccaanncaaggncctttncngncancccntttttacttnaacctttttccttgggccaattnggaaaaanttnggggcccccggaaacccc

SEQ ID NO: 1244 - DNA, 157 bp, Homo sapiens
  misc_feature (1)...(157): n = A,T,C or G
ngtgccgggagatcttgtctgtggactgttccaccaacaacccctnccaggctnanctgcggccngnagctcgacaaatcccttcaggtngcttagaggttgnccaggaaattcaacgagctgctaaagctcctaccanttggaagatgctcaacac

SEQ ID NO: 1245 - DNA, 329 bp, Homo sapiens
  misc_feature (1)...(329): n = A,T,C or G
caaccacanttttctantgngctttcattttttccttcccacaaccatnaatgaggncccttnnagggttttnnttannttttcttttcctnnaaaccaatctccttccaatancttntnaancttaaccaacntcaccattncaataaaaaaaaaaaaaatntcttttctccntaaccatcaacaccacttngtntncctnnctactnctacaccangggtcnnggtgtataaggacccacccanncccaaaannnaaaaaacatttaccttcaagnaactnntatataaaacantaaaantcccccgctntcctcaccatccaaatt

SEQ ID NO: 1246 - DNA, 230 bp, Homo sapiens
  misc_feature (1)...(230): n = A,T,C or G
gtggcangagaaggcgcngacgngattgttaactgcactggggtatgggctggggcgctacaacgagaccccctgctgcagccagnccgggggcagatcatgaangnggacgccccttggntgaancacttcattctcacccatgacccagagagaggcatctacaatttcccgtncatcatcccagggacccagacagttactctnggaggcatcttccanttgggaaa

SEQ ID NO: 1247 - DNA, 232 bp, Homo sapiens
  misc_feature (1)...(232): n = A,T,C or G
gtcgccccgcgtccggaacgatggtnnttacctnccnnacatntgcctggctcagnngnataagagctcagcttgcctctntgaatggcangctcaaagangcaganaanccngcnntatttnntgaacganctgaggntagtgacaggnatatnntngcntntaatttgnatgaatctgantgcntgnatgagacagagtggacaatntatcangactggcntgactggat

SEQ ID NO: 1248 - DNA, 243 bp, Homo sapiens
  misc_feature (1)...(243): n = A,T,C or G
tttcctccccggctgcggctgggacgggggcggccatcggccgttacccgggggcgagaccgcagcgagcgctgggggcnctcggctttggttctgggatggagagagggcctttaaagagcaggacggacacgctctgaacattccngcccaaactcgataaagaacaggaaaaagagaaaaaatcagtgatctgtgttcgagggcaatatttggaggtgggaaagacnacatgcctggaat

SEQ ID NO: 1249 - DNA, 977 bp, Homo sapiens
  misc_feature (1)...(977): n = A,T,C or G
ggatttccacccctcctgcggctgggacgggggcggccatcggcccgttacccgggcgcgagaccgcagcgagcgctgggggcgcccggctttggttctgggatggagagagggcctttaaagagcaggacggacacgctctgaacattccggcccaaactcggtcccccgacccatttcctgtcccgattctttcgaccttgggggcgatggggactgggagctgccttaagccgattctgctcacactctggtgccagcgtgggggaggggggttaccgcccccggcgctctcctgccctccctgggagtggggacccacacagaaacgggtcactgttacacccgggttctggtgtccgccatatggctgttgagagacgcctcagaaccacctgtgggacggatgggcagcgatgcccgccctgggcctagaggaacacctgggtcccaggcccaaaaccacgtccgccgcccactcttccccgtgcaccgcgagtggaggctgttctgcctttccacttgcttaacatccagtctgtgaagatctaaataaataacgtggaaaatgcaaagtataatgtactaagtgaaagaactcgagcacactgggggtccacgaagctgcagctgcagcccagggtggcacatcggcgagacggtggtgcgcgcctccaatctcggagggcgcccaaaatggaaaatgtttttaggccagggagtgagcataaacattagtgtttttgtggtcatgtagcaaattagggcagaggagagttatttaaaagtgagtttaaaaactgatttcctttcttttgtagatnaagaacaggaaaaagagaaaaaatcagtgatctgtgtcnagggcaatattgcaagtgggaagacgacatgcctggaattcttctcaacgccgacagacgtcgangtgttaacngagcctgttgttccaagtgggagaaaatgtnccgtggccc

SEQ ID NO: 1250 - DNA, 582 bp, Homo sapiens
  misc_feature (1)...(582): n = A,T,C or G
ccacgcgtccgngcttgcntgggcggcgccggaagccgncngctggtcccctncccgcggcncctgnagccttatctgggnaccctgagggccccgggaggaggcgcgggcgcnccgggagggaccggcggctngcatgggccgggggccctgggatgcgggcccgtctcgccgcctgctgccgctgttgctgctgctcggcctggcccgcggngccgggggagcgccgggccccgacggtttagacgtctgtgccacttgccatgaacatgccacatgccagcaaagagaagggaagaagatctgtatttgcaactatggatttgtagtaacgggaggactcantgtgttgataaaaatgagtgccagtttgganccactcttgnctgtgggaaccacacattttgccacaacacccccgggggcttctattgcatttgcctggaaggatatntgagccacnnacaacaacnngacattnattcccaacganggcaccttttngttcagacatagatgantgtgaagttnctggcctgtgcangcatggaggncgatgccgtgaacactgaatggggagct

SEQ ID NO: 1251 - DNA, 354 bp, Homo sapiens
  misc_feature (1)...(354): n = A,T,C or G
cccaccgggcttnnagggccatgcctgtgaacgtgatgtcaacnagtgctggnaggncccagagaccctgccccaaaggcaccttctgncataacaccctgggctccttncagngcctctgncctgtgagggcaggagggtccacnttgtgagctgcnggcaggaccctgncctnctangggntgntcnaatggggncacctnccagctgatgccagagaaagantccanctttcanctntgnctatgnnccccaggtttcataggcccngactgnnaggngaatccagacaactgtgncaaccaccannnnnnaaatgggggcacttgccaggatggnctngacacctacacc

SEQ ID NO: 1252 - DNA, 409 bp, Homo sapiens
  misc_feature (1)...(409): n = A,T,C or G
gcgtccggccgtgtgtgcacacgtggcgganctgtgccagaaggggcatggtggctgcagtaagcatgccaactgcagccaggtggggacagtggtnggttgcacctgcctgcctgactatgagggtgacggttggagctgccgagctcgagacccctgcttggatggccaccgtggaggttgcagcgagcacgctgactgcctcaataccggtccgaacacacggcgctgtgaatgccacgtaggctacgtgggtgatgggctgcagtgtctanaggagcttgaaccccctgtggacagatgcttgggaggatcatcaccttgccacactgatgctttgtgcactgacctacatttccaggaaaaacaggctggtgtcttccacatccaggccaccagtggcccttat

SEQ ID NO: 1253 - DNA, 214 bp, Homo sapiens
agggacctagggctctggctttcccctcgctgcgcgcccgcgccccctttcgcgtgaaagctgtcattgttgagatctttatgaaattattgtgcccatgtccaagtttgaattagagatacacagcacacaatcatttctgttaccacttttggaatatctagcattagccttgatagttttgtgtggtgtgttttgagtatatctgaactgt

SEQ ID NO: 1254 - DNA, 414 bp, Homo sapiens
  misc_feature (1)...(414): n = A,T,C or G
gcgtccggagagaaccctgaaatcaagcgtgccaacctggacaaggcaggagctgcgcgtgctggtcaatgcttccctcgggtggcccaacggcctggccctggacctgcattgaagggaagctctactggggagatgccaagacagacaagatcgaggcgatcagtgtcgatgaagacnaagaggcagaccctcctgaaggacaagctcccacacattttcaggttcaccctgctgggggacttcatctactggaccacctggcagcaccacagcatcaagcgggtacacaaggtcaaggccaaccggggacgtnatcattgaccagctgcccgacctgatggggctcaaagctgtgaacctggacaaggggtccgtcggaaccaaccctnatgccggacaagatgggggggg

SEQ ID NO: 1255 - DNA, 784 bp, Homo sapiens
  misc_feature (1)...(784): n = A,T,C or G
acgtaatacgactcactatagttctagaggctcgagaggccttgcggccgctcacagtggtcgtctttctccagaacagacattgtaaggcgatttcaattttagacacctttctccagtataaccagtaaaacacctgcagatggctttctctagctcatggtggaatgcacaagcaccgttgatgcagtaactgttatgatcttccaggcaaaggtgtgagaacttcaaggctatgggtccttctatgttgtcagcttgctgggctgtgattggaggtgttacagtcacggctgcctcttcggtcagtgctgtcattgcgttgaataaaagatagactgatattggaactcccaaagccatgtcgacgaattcgaatcgatgggatcctgcaaaaagaacaagtagctnnnnnnnnnnnnnnnnnnnnnnnnnaagcttgctccgacgtccccaggcagaatggnnnnnnnnnnnnnnnnnnnnnnnnnnnnnnnnnnnnnnnnnnnnnnnnnnnnnnnnnnnnnnnnnnnnnnnaacgcccatttgcgtcattgcccctccccattgacgtcaatggggatgtacttggcagccatcncnnnccatttaccncattnacntcaatnggaataactccaaattaaccctgcctaactccaaaaataaatgtacttgccaagttactattaaatagatattggatgtactgcccaagtggggccatttaccgncatttgaccgtcaatagggggccgtgagaaccgattttgaaatgggcaaa

SEQ ID NO: 1256 - DNA, 523 bp, Homo sapiens
cacgcgtccgccgtcagtctagaaggataagagaaagaaagttaagcaactacaggaaatggctttgggagttccaatatcagtctatcttttattcaacgcaatgacagcactgaccgaagaggcagccgtgactgtaacacctccaatcacagcccagcaaggtaactggacagttaacaaaacagaagctgacaacatagaaggacccatagccttgaagttctcacacctttgcctggaagatcataacagttactgcatcaacggtgcttgtgcattccaccatgagctagagaaagccatctgcaggtgttttactggttatactggagaaaggtgtctaaaattgaaatcgccttacaatgtctgttctggagaaagacgaccactgtgaggcctttgtgaagaattttcatcaaggcatctgtagaggatcagtgagcccaaaattaaagttttcagatgaaacaacaaaacttgtcaagctgactagactcgaaaataatgaaagttgggatca

SEQ ID NO: 1257 - DNA, 653 bp, Homo sapiens
ccgcgtccgcgtcagtctagaaggataacgagaaagaaagttaagcaactacaggaaatggctttgggagttccaatatcagtctatcttttattcaacgcaatgacagcactgaccgaagaggcagccgtgactgtaacacctccaatcacagcccagcaaggtaactggacagttaacaaaacagaagctgacaacatagaaggacccatagccttgaagttctcacacctttgcctggaagatcataacagttactgcatcaacggtgcttgtgcattccaccatgagctagagaaagccatctgcaggtgttttactggttatactggagaaaggtgtgagcacttgactttaacttcatatgctgtggattcttatgaaaaatacattgcaattgggattggtgttggattactattaagtggttttcttgttattttttactgctatataagaaagaggtgtctaaaattgaaatcgccttacaatgtctgttctggagaaagacgaccactgtgaggcctttgtgaagaattttcatcaaggcatctgtagagatcagtgagcccaaaattaaagttttcagatgaaacaacaaaacttgtcaagctgactagacacgaaaataatgaaagttgggatcacaatga

SEQ ID NO: 1258 - DNA, 708 bp, Homo sapiens
  misc_feature (1)...(708): n = A,T,C or G
ggncggtaggcggtgcntaannnnnnnnnnnnnnnnnnnnnnnnnnnnnnnnnnnnnngccattctgcctggggacgtcggagcaagcttgatttaggtgacacttatagaatacaagctacttgttctttttgcaggatcccatcgattcgaattcgtcgacatggctttgggagttccaatatcagtctatcttttattcaacgcaatgacagcactgaccgaagaggcagccgtgactgtaacacctccaatcacagcccagcaaggtaactggacagttaacaaaacagaagctgacaacatagaaggacccatagccttgaagttctcacacctttgcctggaagatcataacagttactgcatcaacggtgcttgtgcattccaccatgagctagagaaagccatctgcaggtgttttactggttatactggagaaaggtgtgagcacttgactttaacttcatatgctgtggattcttatgaaaaatacattgcaattgggattggtgttggattactattaagtggttttcttgttattttttactgctatataagaaagaggtgtctaaaattgaaatcgccttacaatgtctgttctggagaaagacgaccactgtgagcggccgcaaggcctctcgagcctctagaactatagtgagtcgtattacgtagatccagacatgataagatcattgatga

SEQ ID NO: 1259 - DNA, 943 bp, Homo sapiens
  misc_feature (1)...(943): n = A,T,C or G
caccccttcccagcctttgagcccagaaagcgaaggagcaaagcttgctattggccgctgccccaaaggcctacccgcttccattgctcagcggtgctgtccatctgcacgagactagtgagacgtgctacttccatttgtcacgtcctgcacgacgcgagctgcggggcgggggggaacttcctgactaggggaagaagtagaaggtggcgcgaaggggccaccaaagaacggaagccggttggcgcctaccggtggatgtggaatgtgtgcgaggccagaggccacttgtgtagcgccaagtgcccagcggggctgctaaagcgcatgctccagactgccttgggaaaagcgcctcccctacccggtagaattctcacagtggtcgtctttctccagaacagacattgtaaggcgatttcaattttagacacctctttcttatatagcagtaaaaaataacaagaaaaccacttaatagtaatccaacaccaatcccaattgcaatgtatttttcataagaatccacagcatatgaagttaaagtcaagtgctcacacctttctccagtataaccagtaaaacacctgcagatggctttctctagctcatggtggaatgcacaagcaccgttgatgcagtaactgttatgatcttccaggcaaaggtgtgagaacttcaaggctatgggtccttctatgttgtcagcttctgttttgttaactgtccagttaccttgctgggctgtgattggaggtgttacagtcacggctgcctcttcggtcagtgctgtcattgcgttgaataaaagatagactgatattggaactcccaaagccatggcggtctcgagagatctaattcccgcncctaaaaaangaattaaggcctgaaaaaagggaggatcganggggggtcnaaccgaagangttcaagggggaaa

SEQ ID NO: 1260 - DNA, 952 bp, Homo sapiens
gtgtatgatttgtatttgccttggacattcccttctgttttcagtggcttagatttaagacacatgtttggttcactggaggtaccttaacactgatttcattctaaaagctgacatcacattctttcagacaccatgaaaacaacaagtttgggataaggttcattgagcaaatagacttagagaggcccatctaggtggtaaaaaacgctgggtagtaagaacatgaagaacccaagcgaggcattgctttggcttgctgcaaggttgattattattcccatgaaaattcacatctgacatagccaggagcatgaaactcagtctttctgtagtgagaataataaccacacaacaacaaaaaacccagagtgaaactatgaatttgacttgtgtcactgaggcttgttcacttggcttccatcactccttaaggatggcaaagtctaaaggccaacgctgaattttatcttctcatttcattgtgatcccaactttcattattttcgagtctagtcagcttgacaagttttgttgtttcatctgaaaactttaattttgggctcactgatctctacagatgccttgatgaaaattcttcacaaaggcctcacagtggtcgtctttctccagaacagacattgtaaggcgatttcaattttagacacctttctccagtataaccagtaaaacacctgcagatggctttctctagctcatggtggaatgcacaagcaccgttgatgcagtaactgttatgatcttccaggcaaaggtgtgagaacttcaaggctatgggtccttctatgttgtcagcttgctgggctgtgattggaggtgttacagtcacggctgcctcttcggtcagtgctgtcattgcgttgaataaaagatagactgatattggaactcccaaagccatttcctgtagttgcttaacttcggacgcgtg

SEQ ID NO: 1261 - DNA, 699 bp, Homo sapiens
  misc_feature (1)...(699): n = A,T,C or G
acagaatcacagttgccagagaaacatcagcgggctttagctggggcagagcttagcaagtgttggggtatcagcagttagtcactgtttgcctggaaccacaggatgtgaatcctagttcctggattccaaggaatcctgcatccaggtgtttattgtgctttgcagagtcaacatcaagctcaggagctggttgcagacatagatgagtgtgaagtttctggcctgtgcaggcatggagggcgatgcgtgaacactcatgggagctttgaatgctactgtatggatggatacttgccaagggaatgggacctgaaacctttccacccgaccaccgatgccacatcatgcacagaaaatagactgtggtacccctcctgaaggttccagatggctatatcataggaaattatacgtctaagtctggggcagccaggttcggttatgcttgcagaagaaagggattcttcagtgttccaagaaagatacagtttcaaggctgcacaggcctggggcacatgggaagtccccaaaattacattgccaagagatcaactgtggcaaccctccaagaaatgcggcacgccatcttggtaaggaaatcacagctccaggctggggcggtgtgggctcggctatgtctgtcaagagggctttgagagccctggaggaaagatcacttcnggtttgcacaggaga

SEQ ID NO: 1262 - DNA, 643 bp, Homo sapiens
  misc_feature (1)...(643): n = A,T,C or G
ttgaaagagaaggggacaaaggaacaccagtattaagaggattttccagtgtttctggcagttggtccagaaggatgcctccattcctgcttctcacctgcctcttcatcacaggcacctccgtgtcacccgtggccctagatccttgttctgcttacatcagcctgaatgagccctgggaggaacactgaccaccagttggatgagtctcaaggtcctcctctatgtgacaaccatgtgaatgggggagtggtaccactttcacgggcatgggcggggagatgccatgccttacctttctttctttaccagaaaaccactgtggaacccacgcacctgtctggctcaatggcagccaccccctagaaggcgacggcattgtgcaacgccaggcttgtgccagcttcaatgggaactgctgtctctggaacaccacggtggaagtcaaggcttgccctggaggctactatgtgtatcngtctgaccaagcccagcgtctgcttccacgtctactgtggtcatttttatgacatctgcgacgaggactgccatggcagctgctcagataccagcgagtgcacatgcgctccaggaactgtgctaggccctgacaggcagacatgctttgatgaaaatgaatgtg

SEQ ID NO: 1263 - DNA, 295 bp, Homo sapiens
  misc_feature (1)...(295): n = A,T,C or G
gtggtcgcggccgaggtgcttttttttttttttttttttttttttttttttttcgnattnatttatttnattatttttttgaaacatttttacatgtttatttatcaaaagtgaaaaagcntncaattcaacacaatttcaatagcatttgacnccacccctgnggatcctgtttttgatagacacaactcctntnttttntgnttgaagttgaagcttgatgtgagggtcgcttttttnccggaccccgtnaactnggccgtcggggnggatgcccangaanaagcccccgttt

SEQ ID NO: 1264 - DNA, 622 bp, Homo sapiens
  misc_feature (1)...(622): n = A,T,C or G
ttcgcctatttccgcagaaacactgccacctggaagaaccgccgtgcgccacaacctcagcctgcacaagtgcttcgtccgcgtggagaacgtcaagggtcccgtgtggactgtggacgagcgggagtatcagaagcggagaccgccaaagatgacagggagccccaccctggtgaagaacatgatctctggcctcagctatggagcacttaatgccagctaccaggccgccctggccgagagcagcttccccctcctcaacagccctggcatgctgaaccctggctccgccagcagcctgctgcccctcagccacgatgacgtgggtgcccccgtggagccgctgcccagcaacggcagcagcagccctcctcgcctctccccgccccagtacaagccaccaggtgcaggtgaaggaggagccancagaggcagaggaagacaggcagcccgggcctcccctgggcgcccctaaccccagcgcctcngggcctccggaaaacagggaccttggaagaagactgccgggaaaaaaactgtcctaagggccttgtagtgaccggcagggtggggtgagacccctcccttcagaatccaggccccgtcttccccaacttcacag

SEQ ID NO: 1265 - DNA, 1766 bp, Homo sapiens
tttcctttttccaatcttcattctcggggttggcccgccccgatagtcactccatgtcctcgtttactggttcatcttcgtaatctctgtcatggtcaaaatctggactgtggttggctgttgtcactaaggacaggggcccttcagcttcctctggatcgaggggctcttctttgacgtgtacaggatgcacggcttgcataggagatctgcctggactgctgtcactctcgttgctgttggtatgctccattgccccgttcagctcttcccgtattgcgctggctaagttgcccagagtgggatttcccatggaagcggtagtgtatagaggtatactattctcagccattgaagcctgtaaagctgcattgagaggtgtgcagtaggcgtggctgctctgcatgtttttaataagggaagggttaccactgatcttttgtggccttcgtttttggaattctacttcatccactgtccatactgcccctttaacgttttctactcgcacaaaacacttgtgaagactaagattatgacgcactgcattcttacacgtggccgcgttgcgtcggaagtaagcaaacattcgtgtgaaccagttatagatctcatttagtgttagctgcttttctggagattcgagaatggcctgcctaattaaagatgcatatgtaaatggtggtctaacttctgcagttcttataaaattcttggttctgcgcaatatctgctacgaaatgggcacgttgtatttgtctgagtaccgctgcggatgggtcccaccgtgtgcatgctggtggttgtgatgacagaggggccttgggtgacgggagtcaggggggcggttggggtcgttggagtatgaggtaagctctgtggagaagcctccgatgcggacttggagagagtgacacttgataccagattcaagggctgaggggcggctttgggttctgtagacttcacatgcaggtgggtcatcatggcttgcaggcgttctttgtcttttgcaagctgtagctctaactgctgtacaacctgcatttgtactctacattgggctgtacttctatcgtccagcgcatgctcactgttgaagatgttttagaaatgattggaaatcttcgcacactgcttcacagcctggccacttgcatacaccatgtccatagagaggatggctatgggggtgctcctcatgggacaaactttcccttttgggagtgtggactgagagctgtccattggtagaggcatgtgggttcattattaaggaggtcttggaaggtgcagaggaggagacacatgtcgtggtcagatccaaactgctgtgattgttgcctgtggtttcttctgcagtatgagcacttgtcacttctttccagagctgctgcagttctgttggaatcatgccttgagcaagaggttgaaggggaagggcaggctgcccgggctgaattgtcagaaggccttggcgctgcaaagacaggaggtgctgctgctgtaactgctgcatctgtaaaagcctgctgctgaaaagccaactgctgggtagccacctgctcttactctttaggctgttttccagcatgttgttgttgtaaaagttgaagctgcaactgttcctgttgttttttataaaactcttgaagctgctgctgttgaagcatgagggcctgctgctgctggaggagaacctggagctgctgagggctcagcacttgttgctggaggatctgctgcatttgctggggagtgataac

SEQ ID NO: 1266 - DNA, 320 bp, Homo sapiens
  misc_feature (1)...(320): n = A,T,C or G
ggacaactactggatgctcaaccccaacagcgagtacaccttcgccgacggggtcttccgccgccgccgcaagcgcctcaaccaccgcncgccggtccccgcgcccgggctgcggcccgaggaggccccgggcctccccgccgccccgccncctcgcgcccgccgccccggcctcgccccgcatgcgctcgcccgcccgccaggaagagcgcgccagccccgcgggcaanttctccanctccttcnatcatctacagcatcctgcncaatcccttccgcatccgccgcctcanggacacggcccccgggacgaccttcaa

SEQ ID NO: 1267 - DNA, 317 bp, Homo sapiens
  misc_feature (1)...(317): n = A,T,C or G
gcccgncccttgantccccttgttnataaaccattcccacccgnacacnaaaaatttcntgtgntcgttnttcgcccccntttgcntcaataacntaaacaanaccatccanccatnccantngggtgtgcttccaggtaaagnaccntttgcnccccggtnatgtccgcnttcggnttcccntggcccaacatgcttaantgcaaccntttcccccagnacaacnacctttgcatccccctcgntagcancnaccacntcntgccanccaccnaggaagctccaaaggtatntnaagcctncaaaaataaaaatna

SEQ ID NO: 1268 - DNA, 138 bp, Homo sapiens
  misc_feature (1)...(138): n = A,T,C or G
gagcccgacccacgcgtcctggnaaacggncagcagcncgcggtgtctccagctgctcantccgctctatctgngagngcgcgcgccagggctgcgaatccctcatgaacaagttcggttttcagtggcccgagcgcc

SEQ ID NO: 1269 - DNA, 468 bp, Homo sapiens
  misc_feature (1)...(468): n = A,T,C or G
ccacctctatgacaaaggaggcatcgagaaaaccatctgtatgctggacggggtgtttgcattcatcttactggacactgccaataagaaagtatttctgggcagagacacctatggagtcaggcccttgtttaaagccatgacagaagatgggtttctggctgtgtgttcagaagctaaaggccttgnttccttaaaacactccaccactcccttcttaaaagtggagcccttccttcctggacactatgaagttttggatttaaaaccaaatggcaaagttgcgtctgtggaaatggtcaaataccatcactgtacggatgaaccattgctgccatctatgacagcgtggagaaactctttccaggctttgacctagaagaccgtgaagaacaatctgcgtatcctttttgacaacgctatcaangaaacgcttgatgacagaccggaagntttggctgnctttta

SEQ ID NO: 1270 - DNA, 267 bp, Homo sapiens
  misc_feature (1)...(267): n = A,T,C or G
gcacggaggagcccacngnggagccccagcgtccgaacgggcngaccccctngagccgngaaggancccganaagcagncactatgtagcaggaatctttgcctacatgaactacagagtcctccggacgaggaagganatcttngaaaccctcatcaagggcctgcattggntgnagtacatangctacnantcgggaggngnggtgatcgangggaatnntnacgnaangggaanaaagacacattcanctggncaagaaaaggg

SEQ ID NO: 1271 - DNA, 172 bp, Homo sapiens
  misc_feature (1)...(172): n = A,T,C or G
atcngtacaacgaacgggataaatgttnaaaaaacaggaaangagaaaaagcactgatattatgatccaagaaaatggaaatggnctggaatgnnttgaaaagagtggncattgtncagnttgcctcactggaaaatatnctgtagaattagaanggtagctggtagggttg

SEQ ID NO: 1272 - DNA, 772 bp, Homo sapiens
  misc_feature (1)...(772): n = A,T,C or G
cgcaagaggcctgcggagggatagaggggccggttcaggaccatcaggggctctgggaaagggggttagggatgaggctcagcctctcatctgcccagctggtccccgccacctcttccactctcagctggactcccctgccaggggtccagatcctgccagagtagttggtcccccagccatgtccggcctggacacaggactcatggtggggccagactacaactctgggccagagcattgtctttagntactgcggccttccccactctttcctcagttccgagacggcgtacaacacaggcccccctcctgggacacaagcctggaccacgttncaggaagaagggcctctgggtctggttctggccacggtcttggagtcccctctgcacctcctggagaggagagaaagcaggttcacaggggagggcagctcagcccatctccaggagggagaggcctctgcaagaaatgagaaaaatgatcaaaaggcaagacggagaggaagagggcctgaagacacaggaagaggggaggaccagatgggagcatggaagagatccaaaggcccatagaggacaagctcagcctccagagactatgtacgaaggacaccacccatgcccgaagacctccaaatgcaagttcatgtctgttctggatccaaggacaccagggccttgatggtgcaaatctgagttcagggggccttcgatggaggatgtggcttctcaagatttagacactgaggccagacacagtggttcac

SEQ ID NO: 1273 - DNA, 599 bp, Homo sapiens
cccggcgctccgctgctggggggcccgggcgaggatggcggcggagaacgaggccagccaggagagcgccctgggcgcctactcgccagtggactacatgagcatcaccagcttcccgcggctgcccgaggacgagccggcgcccgcggccccgctgaggggccgcaaggacgaggacgcctttctgggagaccccgacaccgacccggactccttcctgaagtctgcacggctgcagcggctgccatcgtcgtcgtcggagatgggcagccaagacgggtcgccgctacgcgagacgcgcaaagacccgttctccgccgcagcggccgagtgctcctgccgccaggatgggctcacggtcatcgtcacggcctgtctcaccttcgctaccggtgtcaccgtggcgctggtcatgcagatctacttcggggacccccagatcttccagcagggtgccgtggtgaccgatgctgcccgctgcacttcactgggcatcgaggtgctcagtaaacagggatcttctgtggacgcaaccggtggcagcagccttgtgtttgggtatcgtggctccacacagttcttggcctgggccgttgggg

SEQ ID NO: 1274 - DNA, 289 bp, Homo sapiens
  misc_feature (1)...(289): n = A,T,C or G
gccgctctanaactagtggnngnncngggctgcagnaattcggcacaagcccaaacctccttctgcttntcaaactctattccgacatcctccaacatggaggaaacgcancaaaaatccaacttanagctgctccacatctccctgctgctcatcnagtcgcggntggagccnttgnggnncctcaggagtaccttnaccaacaacctggtgtatgacaccttgnacagcgatgacttatcncctncttaaaaggacctaaaggaaggcatccaaatgctgatggggg

SEQ ID NO: 1275 - DNA, 247 bp, Homo sapiens
  misc_feature (1)...(247): n = A,T,C or G
cgtccgctgtctcctgctcatcccantgaacctnctgatgttggactccgcaacctggaccccatgccctntgagggcaagaagggctcctttaaggaggagngcaccctgcaggagctgctgctgtccccttacctgtgggtgctctcactggctaccttgaggtgtttggagtaaaaacctgctgtactgactggggccagttcttccttatccaggagaaaggacagtcancccttgtaggtag

SEQ ID NO: 1276 - DNA, 660 bp, Homo sapiens
  misc_feature (1)...(660): n = A,T,C or G
cccggataaagcaaagtctatgttaggtacagattttaaccatacaaacccagaacttcataaagaacttttaaaatatggatttaatgtgattatcagtagaagcttgggcatcgaaagagaagtgccagataccaggagtaaaatatgtactgtcaccttattccataattatcagtnggagtaaagagtcaaaaagatgcaaataaggagaagtgtttgaacgagatgacacaacatccaaggcatttagatggatggttttcttcatattgcttctgcctgcaggcgtcttcaaaaacattacccagcccgcctcccgactgccagcattgtcatttgcttctataatgaagaatgtaatgccttgtttcagaccatgtccagtgtcacgaacctcacgccacactattttcttgaagaaattattttggtagatgacatgagcaaagttgatgatttgaaagaaaaactagactatcacctggaaacttttcggggaaagggtaaaataattagaaaaaaaagagagaggggctgattccagcaaggctgattggagcttctcatgcttcangggatgttctggnggttctggaccagccctgngangtgaacaagaggtatggctggaggcccctgntggatgccattgccaag

SEQ ID NO: 1277 - DNA, 507 bp, Homo sapiens
  misc_feature (1)...(507): n = A,T,C or G
ctcctctccagtcctactttgagcacatcggtacctatgataatcagatggagatctggggaggggagaacgtggaaatgtccttccgggtgagagtgaagagggctttggggggaaccacaacatcccaggcgacagcttgagaaacatctctcaggcagaggtggcatcagggacatcccatctggaactgaactagaaagggtggctatttcccagtgtgcctcttcctcttttctgctccccctgtccatggcagtagggcttgggcagtcagcctggacagctcaaaacaaactactgggcacaacttctcagaggcaaggaataataggggtaatgaggactggacatctggtgactggggactcttttgcgatgtctgtgggaaagggttagggtgaagatagaaacaggttagtatgttcacaactagggctagaaaaaaaaaacagatgagtnaccagtcatcatcctttttctggaaaaatcangctcccttcccag

SEQ ID NO: 1278 - DNA, 496 bp, Homo sapiens
  misc_feature (1)...(496): n = A,T,C or G
ccagcacagaggagcacctaaagggangaagctggagcagtaccgtgaagcagctgcagggtggtgagggtggtgccggcaggaggagcggaaggggctgatcaccgcccggctgctgggggccagcgtggcacaggcggaggtgctcacgttcctggatgcccactgtgagtgcttccacggctggctggagcccctcctggctcgaatcgctgaggacaagacagtggtggtgagcccagacatcgtcaccatcgaccttaatacttttgagttcgccaagcccgtccagaggggcagagtccatagccgaggcaactttgactggagcctgaccttcggctgggaaacacttcctccacatgagaagcagaggcgcaaggatgaaacctaccccatcaaatcccgacgtttgctggtggcctcttctccatctccaagtcctactttgagcacatcggtacctatgataatcagatgggagatctgggagggg

SEQ ID NO: 1279 - DNA, 240 bp, Homo sapiens
  misc_feature (1)...(240): n = A,T,C or G
ccacgcgtccggattattgagcggcnggaccacctggagaatgtcatcaagcagcacattcaagaggctcctgccaagcctgaggaggcagaggccgggcccntcacagactcctctctgtttgcacactggggccaggagctcagccccgaaggccggcgcgtggccctgaagcaattccagtactacggctacaacgcctacctcagcgaccgcctgccccttggaccggcccctgcc

SEQ ID NO: 1280 - DNA, 826 bp, Homo sapiens
  misc_feature (1)...(826): n = A,T,C or G
ttttttttgaatgtcactaaagctttatttataggggtcaaaaagtagaaataatccaaaggtcctatcaatgtataaataaacaatggcatattccatattacaaatcactatttgcagtagaaaagaataaaattctgatacatgcaacaatatgaatcttaaaggcacaaaaaatggtgtggatccatcataaaaagttcaaaaagagacaaaactaatctatgtttagagaggtcaatataacggctgcctctggggatgtaagtaatgactacaaaaaacataaggagactttcaggggtgatgggatcattctatgtcttgatttggctgatggttacacaggtgtatacatagcaaaaaattcagtgagctgtatacttacgactgtgtatttcactgtttcaagttacatacaacttaaatctttttgtaaaaagttgagtatgtgagtattttggtaataataaagtttaaaatccccttctaatccattaagataaataattatcctcaaacgcctcaaacacatagtgctaataatcagtagacgcttgagatattatttctatcagcatctaattattttctaagtggggtaagtagtaacatagtgatataacatttgccttaagaccatcagcactcaagtgcgatgtacttgatattcagattatagcttttcatcacatactatcaggaccacagntagtacttactctcctaactctacatctggctaagatctggtgagtgcaatcatctcacttgccattaaattgaactgatcggattcaaacatctctttgatcttttcttgatc

SEQ ID NO: 1281 - DNA, 650 bp, Homo sapiens
  misc_feature (1)...(650): n = A,T,C or G
cgccctttttttttttttttttctggtcatatttttttaattgcatttcacgtaattccacgatgttccaaacttacactcttgtgacactatgttgaatgactaggagacttttaaccctttattaatgaaagtgatttgttttcctttcacaggctgttcacagatgcctccaactctgggaagacattatccaaataccactgaaatgacttgcaacccagtcgtttccttaactcaacacgctcgcgaatatttccgtaggtgacatatttcagaccaggctttcgaagaaaaaactgctccttatattcatccagccaaacgtgcaccagtcttaggtagttatgtgtcatagcactgatgattgtagaaagttttccagttcgattcttactgatatgtcctactcgagagcaggggattataaagagttggcctccacacatccagatccttagtgaaagatacaaattttctcttccccaaaaatccatatccttgtcatactgtccattttcattaaaataatgcccgcgtatagcanaaattcctccagacctttgaggtgaaaccggatgggtttatagatccttctgtccatccatctcataagagaaaacattaatccattttaaattgtggtccca

SEQ ID NO: 1282 - DNA, 357 bp, Homo sapiens
  misc_feature (1)...(357): n = A,T,C or G
tatagggcgaattggagctcnccgcggtggcggccgcccgggcaggtcgcttggaaccttttggggatgtgacagagaggaagcagctccgggacaagctccagtgtaaagacttcaagtggttcttggagactgtgtatccagaactgcatgtgcctgaggacaggcctggtttcttcgggatgctccagaacaaaggactaacagactactgctttgactataaccctcccgatgaaaaccagattgtgggacaccaggtcattctgtacctcggccgcccgggcaggtcnnnnnnnnnnnnnnnnnnnnnnnnnnnnnnnnnnnnnnnnnnnnnnnnnnnnnnnnnnnnnnnnn

SEQ ID NO: 1283 - DNA, 391 bp, Homo sapiens
  misc_feature (1)...(391): n = A,T,C or G
annacttttntctattttaactttcancttnttaanagtccatgtcctgctcttatatgaccnanggcnnctttaaanggaagctcaancctcagtggtntnctgtancccaaagagaaatgggcngnatgaaaggagatcggactctacctgtctggactcctaccatggnaggaggncttttttaattnacagagatttctttcaggaaaattggnacatatgatgctggaatggngtnggnggggaggaaaaaaccnanaaaanttnctttaggattttggcagtggtggaggaacttttgaaattgtncatgctcacatgttgggacatntgtttttggaaagctacaccttacncggtttnaaggaaggcacagggcagaattnta

SEQ ID NO: 1284 - DNA, 1995 bp, Homo sapiens
  misc_feature (1)...(1995): n = A,T,C or G
nnnntttttttttttttttgatagccaaaagcaatttattatagtttagcctcaaaaaaataaaaataaaaaaattatccagtggttatgaggagtctaggaaaacctgtcccagtaatgccaacttggaggtgaagggctgactggggcagctgagaagtgggaccttctgtttggcaggcttcctctcccttgcctggtcatggttttctggtgagaagagtgttcctggccttgctggaggttcccatggccccgaactaacagtgtttttctgaaatttcgacctgctccgtttgagagagtagaattccctcatcaagtcctccacctcccactgctcttccttcagcctctggcagcagtgcagggcggcagggtcgatggggtgagcttctgtgttgaagatgtaccccccagcccccaggatgcactccccatagggggtgatcaccgcgtcgaaggtggacccattgttgtggatgaagttggttgggtcaaacaggaggtagaggtatttcacagtctcggccaggaagaacgactccatgcggttgtccagcttgtggtctcgcagatctttgattgttgcaaatccgcactccaccttgctgattttttcaatggattccacagcatctcttccgagttctaggagggtgggatcccccgtggcacggtagaggtacattgcgctttcaataagttctggccgaagtgggtagccctctcgcttctccagcacgaatccctaatgaatgttgtagaattccgggagccccccaaactgcttccatacagtgtagtagttgaggaaggtcctcatggcattgtcaatgtctccaatgaggctctgaagaccaggccagtaggcctccaaggactggaagactggcatggacacagtccccttgtacatctgaacccacaggtaccagtcatcgaagcgggtgtagttccggatggctttgttatactctaggaacatggccatgagcttcttatcctgaagcaggatggctcctttcaccaagtactcaaagtaggagtccacgccagccccgatgcctgcgtcctgggccacccacttgccagtgagcacatcaatgtggttgccgaccagcccgatatctgaccggctctccccagaggcgcatcaaagccactctggccacatcttcgaacaccgggtcaccagtgaggctgctcagggtggcaaattcaacaatgaaggtcccaatccctgccgtacaggtgacaggggtctctcctgggttcacgccatgaagtaagttcactgttccatatggcatgccagtgggggtctgaaaggctgggaggagttttcgggccgcctcctcagccaattctcaaggaaaagccccggaaacagggccatccagcctctacttcccaccccagccttcttggagagcagatgagcagacaggagtcctccctaccactcgaatgtttgtttcaaacacagaggcgttcacatcaatatcaaagtccacgctgtcctggagcacttcaaccactctttggaattctgagacattccccaaaatcagcaaggtgtccagtgcatcaattagagtcagagaaaaactgccccaggtgtcgtgcccgtcacaggtgagaggtcgcagctcatcgaagggaaaggcattctccaggtagctgtcgtaggcgtggtagaacatggccttgactcgctccctgtagtgggcgggatctggcgcggagccgtcgggacctggcgcaccatggtgctgaggcagcagcgcgcacaggaggccgagcgggatgagcagccggaaaggcatagagctcgtgtcctctcagcgcccccgcagcagcagcagccactgcaaccagttcatcctggaccgacgcgtctcaactgttgtaaatcatgcaattaaagttgattacttataaatatgaactttggatcactgtatagactgttaaatttgatttcttattacc

SEQ ID NO: 1285 - DNA, 693 bp, Homo sapiens
  misc_feature (1)...(693): n = A,T,C or G
cgccccttctcccagagcctcattggagacattgacaatgccatgaggaccttcctcaactactacactgtatggaagcagtttggggggctcccggaattctacaacattcctcagggatacacagtggagaagcgagagggctacccacttcggccagaacttattgaaagcgcaatgtacctctaccgtgccacgggccaccccaccctcccaaaactcaaaataaatcctttgtaatacatacaaaaaatcagcaacatgaactgattattatcaaaaaaagatcgctttggctgctttgtgaagaatagattgaaagggtcaaaggtgagagccatctcacatccatgcaggaaccaagcaggcaagatataaatatgaaagtagaagaaaatagtctggaagaaaatcccctgaaaagcctacagtgttggggtatggaattcaaaacaacaacaaaacacttattttgcaaaagtttgtaatgtgattatattctataagtaaaatatagatatgtgtaggggaagagagaaagacctacatgtggaaggggaaaaaaataaacccctgatatgattttggtttctaatatgctgtattgngtgaaaaaccaaaatgataaagcccactgggggccctttnctaggaatgctgggctcattttccatgaaccatgnaagccctttt

SEQ ID NO: 1286 - DNA, 738 bp, Homo sapiens
  misc_feature (1)...(738): n = A,T,C or G
cgggcaggtacattgcgctttcaataagttctggccgaagtgggtagccctctcgcttctccactgtgtatccctgaggaatgttgtagaattccgggagccccccaaactgcttccatgcagtgtagtagttgaggaaggtcctcatggcattgtcaatgtctccaatgaggctctgaagaccgggccagtaggcctccaaggactggaagactggcattaacaaatccacccactaccccgcccaccctgccatgtcgaaggcggctttagtggcagcatgaagcgcaccccgactgccgaggaacgagagcgcgaagctaagaaactgaggcttcttgaagagcttgaagacacttggctcccttatctgacccccaaagatgatgaattctatcagcagtggcagctgaaatatcctaaactaattctccgagaagccagcagtgtatctgaggagctccataaagaggttcaagaagcctttctcacactgcacaagcatggctgcttatttcgggacctggttaggatccaaggcaaagatctgctcactccggtatctcgcatcctcattggtaatccaggctgcacctacaagtacctgaacaccaggctctttacggtcccctggccagttgaaagggtctaatataaaacacacccgaggctngaaattancccgctgcttgaggagaccttcctnaagcctcaatggacctaccctggcaggataga

SEQ ID NO: 1287 - DNA, 349 bp, Homo sapiens
  misc_feature (1)...(349): n = A,T,C or G
ttcgagcggccgcccgggcaggtactggctcctctgtggtgtctgcctgttgcgtgacactctccttgcangntcttgangttgcggcanaacatcgcggatgggaaccgatggtgggtggggctgcagagtgccccatcggtcaccttgtttctcaactacctcgcatcattgcagatgctancgcgttgcctgtcgatttcccttggatacctacaccgtctataatagcagtgccacatgctctnaccctgcatggagagacnttnaccagtcctatancaantnctcatagaagctgnctccaagtccttgcaactgatacatngatgttgaccccactgtccac

SEQ ID NO: 1288 - DNA, 240 bp, Homo sapiens
  misc_feature (1)...(240): n = A,T,C or G
ctgagcccngggacaaganggagagcttctttgtgggagaaacactgaantncctctacctgctgttntntgatgacctgnanctggtcggcctggacacctgtgtgtttaacacaaaanctcatcccctgcccatntggtntnctgnctatgnngagancnccngnnctggnnactaanggaaaccanngtggcatctgaancattgtagancngggnanggcccatacacaagctggc

SEQ ID NO: 1289 - DNA, 300 bp, Homo sapiens
  misc_feature (1)...(300): n = A,T,C or G
gtncggacccctgtacctgtacggcngggattgggaccttcattgntgaatttgccaccctgagcagcctcactggtgacccggtgtncgaagatgtggccagagtggctttgatgcgcctntgggagagccggtcagatatcgggctgagtataacaaaagtcatccggaactacatccgcttcgatgactggtacctgngggttnagatgtacaaggggactgtgtccatgccannnttccagtncttggaggcctactggcctggtctttatagcctcattggagacattgacaatg

SEQ ID NO: 1290 - DNA, 351 bp, Homo sapiens
  misc_feature (1)...(351): n = A,T,C or G
acnccgcgtccttnctcccccttcntttttttttttttttttttttttttttggttcttttccagtttttttacgaaaaatagactctttgagttnacattnaccccagagctatatgggatgacaataaggagacacctgagatgagcttacaaagatctgaaacaatgagaccagaaacccaagcccttgtctgcatattccaagngacacaaatggcctagctttccttctgtcccattagtactnttcagccatgatcagtaagacaagactggnccatccttggaaggggcggcagcccatgccccgcccatcctggtcactgnactgntcccacagaaatccggt

SEQ ID NO: 1291 - DNA, 566 bp, Homo sapiens
  misc_feature (1)...(566): n = A,T,C or G
agagcttggtaataagaagcacttaaatcactccaaagaagactttaaaaagggagcagtgaaaaggtcttaataatttattgattgaattaagaaatactagctaattaagaatctgagtctaaacagcacagattttttctttctgcttttaaattgtgttttaaaaaaagaagtagagacagggagacggggtctcactgtgttgcctaggccggtcttgaactcctgggctcaagtgattctcccaccttgacctcctaaattgttgggattacaggtgtgagacagtgcacctggccgaaatagctcaagtttctgaaaaacaaatctgaatctatttgttattcttagcgtcactggtctggctttcagaattaacatacaaggttgccacacctagttctgcccagctttatgtcttttattccagtattccaccaaagtttgttttcctgcattccagttctcaagtcttaagataaagattgtacttgacagtttagtatatccataaaactatttgaggnggttaaggttcttgggttcattntccttaatacttt

SEQ ID NO: 1292 - DNA, 260 bp, Homo sapiens
  misc_feature (1)...(260): n = A,T,C or G
tcgacccacgcgtccgccncctncnnggcccntgtccngcntgtgggtntgaaagangtggagtgtggggaacgacgatnctgtcangnntnccnaaactnctggagacacnccccacaggggnggnnnntnngtnncnnntgtcngtgtgtctgtgatnccnancggtgccactgntgtnctgntcgtctcngggacacaancatnggtancaagngtntgcgctnggangnnccgtnctgggactgncctntgaggga

SEQ ID NO: 1293 - DNA, 1155 bp, Homo sapiens
  misc_feature (1)...(1155): n = A,T,C or G
gcgtccgggcgcgcacccccaacgaaagtggctgtgatgaagccccacagccctggcgttgcccactccttctgccacgtcccagggcccacgggcccacatggtgtgtgacatcccagtgccccgcgtgcaggcaaggcacacctgaagcgtgccatcctggggcaggaggaggcgctgcggctgcacgccctgtgccgcgtcctgcgcgaggtggacctgcttcgggctgtgatctcccagacgctgcagcccccaccggccaagtatgcggagctcgaccgtgaggatgacttctgtgaggctgccgaggccccggacatccagcctaagacccaccagaagccagaggccaggatgccacgcctgtcccaggggaaggggcctgacatcttccatcggctccggcccctgtctgtgttctcagccaagaaccggtggcggctggtggggcccgtccacctgacccgaggagagggcggctttggcctcacgcttcggggagactcgcctgtcctcatcgctgccgtcattccagggagccaggccgcggcggctggcctgaaggagggcgactacattgtgtcagtgaatgggcagccatgcaggtggtggagacacgcggaggtggtgacggagctgaaggctgcgggagaggcgggcgccagcctgcaggtggtgtcgctgctgcccagctctagactgcccagcttgggggaccgccggcccgtcctgctgggccccagggggcttctaaggagccagagggagcatggttgcaagaccccggcatccacgtgggccagtccccggcccctcctcaactggagccgaaaggcccagcagggcaagactggaggctgcccccagccctgtgccccagtgaagccagctccgccctcatccttgaagcacccagggtggccgtgagggccaggatccctgcacgcctcagccctggctccagctggcagcaagcaccgagcatgccctccccacccagaggacctccgggcaatgcctgtcccgcctcatgctggaggctgcctcgggcacctgcctgcccattaaagactggtcagacctgtcaaaaaaaaaaaannnnnnnnnnnnnnnnnnnnnnnnnnnnnnnnnnnnnnnnnnnnnnnnnnnnnn

SEQ ID NO: 1294 - DNA, 970 bp, Homo sapiens
tttttttttttttttttttttttttatttttttttttttttttttttttttttttttttttcttttttttttcacctattttaattttttttttttttttaaaggtaagagcactttattcttatttgaaccacactgtattgttgattaccgagtgtgaaggtagtatgttcagagtcttgttttatgcctttgtagctgtgttgccagcatttgaaggtaactcctccacataagcggcaggaaaatggccttttttcccattcaaagatccaaaccaccatccttcttcttttttctcgtgtataatcacaatgtcacccttttccaaattcaactcatcatcttgcctggcttgaaaagaatacaaggccttgcaaagtctgctgctgagctgggctgcaccaggggctggagttgaagaacctggattgctctgcccaccagaagatgccttgctcacaatattctctaatctcttcattaaaaaaggccgagatattttcacatagctatgagtatgctccttttccctccacctgaagatggaattactacaaggatggctgggttgaggtctttgctcaagttctgctaacattgatgacagtttgtaggagttcgcttccaaaaggtctagtttcaaattgttctcatccatcaacgctgctgtgtctttctggctctttgcatcagagaaggaggaggtgctggagtacgttaaaaacattcaaaacaacaaagaaaataaaatcacgcactcaaccaacattcacactgtctcagtgggacacagccaggagtcggtcgctctcaaagggagcctagaagtgataccagtgagattttttttttttaagacggagtcttgctctgtcacccaggctggagtgcagtggcgcgatctcggctcactgcaacctctgcctcccaagttcaaacaattctcctccctcagcctctgagcgga

SEQ ID NO: 1295 - DNA, 627 bp, Homo sapiens
  misc_feature (1)...(627): n = A,T,C or G
nnnnnnnnnnnnnnnnnnnnnnnnnnnnnnnnnnnnnnnnnnnnnnnnnnnnnnnnnnnnnnnnnnnnnnnnnnnnnnnnnnnnnnnnnnnnnnnnnnnnnnnnnnnnnnnnnnnnnnnnnnnnnnnnnnnnnnnnnnnnnnnnnnnnnnngagcaggaaaaagagaaaagagaagggaaaagaaggatgcagaaaagagaaagatatgcagaaaagggggtaaaaaagaaagaagaaataggagagagaagtagacaaaataaaaagtgtaaagaagagagaatgacataaagaatgattagagaaatatggaagagagaagttatgtaaagtgcagagaacgaagcagagaatagaagaggggaaagattgaagagagtaagaaagacacagataagaagacaaaaaaggagagaagaaagtagaagaagaagaatgagatatgggtaatagaaagagagagaagatgcagaaataagattgaagaaaagagaagagtatagagtgtgagaagaagtaatgtgtggaagcaatatggatgtaagaagtgtagaagatggagttagagccatattaagaatagagagcatgatgagacaagaaagtaagagatatgtgaatgaata

SEQ ID NO: 1296 - DNA, 793 bp, Homo sapiens
  misc_feature (1)...(793): n = A,T,C or G
ctctctagctcgactcactctggactgactcgctccctggctttctcagttcgttttgggagataacttgttttgctccaagccgcatccgttgaccccttacagtcggatggtctagatgactgaatggagttttgagttggacttttgtgtccctgacgganttgggcctgatcccagagcactgggggtggggaggaggtgttactgtaaaatgcangttggataaaaggaggacctctcgccaagggccccaatgagtggcacacagtctactatcaccgacaggtttcccctcaaaaaacctataangcatggaaagtattttgaacccganagtcaccaacagataagaagcagaangntgagcgcattgcatcacatgattttgaccccacaggcttgntcagcggtgcgtaatcattcanaaagatgacaatggatttggcttgncggcaatggagacaatcaanctttggacaggctgtnaaagaaanngacaaaccttcggcttgagtccagacaggngatcaataatnaagggaatggaccttggnggactattnaatcttttgnggngggaantaataangnanngaaggtatcttctttaatggttttnaancttaagaagaccnaatcnttaanngcaaagaaaantttgctntggagatttntattcccnnttnttttttgaancccnactttttnnanaggggggggnngnnnntacttanaanncaanctntcctnganannnnntngggganantctttnaaaaaaaaaaaaaaa

SEQ ID NO: 1297 - DNA, 985 bp, Homo sapiens
  misc_feature (1)...(985): n = A,T,C or G
cgccttgtgccttctggaggatttctctctagctcgactcactctggactgactcgctccctggctttctcagttccgttttgggagataacttgttttgctccaagccgcatccgttgaccccttacagtcggatggtctagatgactgaatggagtttggagttggacttttgtgtccctgacggagttgggcctgatcccagagcactgggggtggggaggaggtgttactgtaaaatgcaagttggnnggngggaggacctctcgccaagggccccaatgagacgcacacagtctactatcaccgacagtttcccctcaaaaaacctataaggcatggaagtattttgaaccgagagtcaccaacagataagaagcagaaagttgagcgcattgcatcacatgattttgaccccacagatagctcctccaagaagacaaagtctagttcagaggagagtagatccgagatatatggtcttgttcagcgttgcgtaatcatccagaaagatgacaatggatttgggctgacggtcagtggagacaatccagtcttcgtacagtctgtcaaagaagatggagcagccatgcgagctggagtacagacaggtgatcgaatcatcaaggtgaatggaactctggtgactcattcaaatcatctggaggtggtgaagctaatcaaatctggttcctatgtagctctcactgttcagggacgcccaacctgggtcgccccagattccacttgccgactctgaagtagagccgtcagtcattggacatatgtctcccatcatgacatctcctcattcacctggagcatctgggaatatggagagaatcactagtcctgtgctcatgggggaggaaaacaatgtggttcataaccagaaagtagaaattctgagaaaaatgttacagaaagaacaggaacggctacagttattgcaggaagantacaaccgaacacctgcccaaaggtc

SEQ ID NO: 1298 - DNA, 398 bp, Homo sapiens
  misc_feature (1)...(398): n = A,T,C or G
ncacnagcnnangcccgntnccanntcctgccagnngcttatgggtcntgnannctgggatantgagngtctgnngcacnccatcnccntgctncnggagnngactgttaccnantatgaggagaancgntgctnnctatnatcgaagccaatggctgccctgaaattcaaagctanacctggactttnctaagntgccctacctccatggatggtcngaacatggatcacccagagcaatgccatcttgcgctacatcgctcgcaagcacaacatgtgtggtgagactgaagaataaaagattcgagtggncatgatagagaaccaagnaatggatntccagcacacaactgataaggctctgtacagctctgaccacngaaaaactgaagcctcaa

SEQ ID NO: 1299 - DNA, 302 bp, Homo sapiens
  misc_feature (1)...(302): n = A,T,C or G
cgcccacgcgtccgatatccactgctcggtgaaagcanagaactcggnggcnggccaaatngggaggctgcttcccgggctnggntcacggtgcacctggagcagggcggcaccaagctggtgaaggacctgagccccgggnganncgcctgcttggcgnnnntgacncaccagcngcccggtttgctctacacncgacgtttnctccactgttnctcggacacgcagacagactngcttccaacgaaagcgtctttctaccgngaatctgacgaactgctgggagcccgtgccgagccgcc

SEQ ID NO: 1300 - DNA, 481 bp, Homo sapiens
gcgtccgccagctttgggagggccggccccgggatgctacacacaacccagctgtaccatgcatgtgccagagacacgctggccaatcgtgtactcgccgcgctacaacatcaccttcatgggcctggagaagctgcatccctttgatgccggaaaatggggcaaagtgatcaatttcctaaaagaagagaagcttctgtctgacagcatgctggtggaggcgcgggaggcctcggaggaggacctgctggtggtgcacacgaggcgctatcttaatgagctcaaggcggggaagctggctgtggagcgaggctgggccatcaacgtggggggtggcttccaccactgctccagcgaccgtggcgggggcttctgtgcctatgcggacatcacgctcgccatcaagtttctgtttgagccgtgtggagggcatctccagggctaccatattgatcttgatgcccatcagggcaatgggcat

SEQ ID NO: 1301 - DNA, 561 bp, Homo sapiens
  misc_feature (1)...(561): n = A,T,C or G
tcccnacttccttgtgcagaggaagtgcgcggacgccccctgctacncagacnggaggaaccataatggcggngaagctggntgtggaacaangttggaacatcaacgtgggggnnggcntccaccactgctcnagcgaccgtggcggnggcttctgtgcctatgcggacatcacgctcgccatcaagtttttgtttgagcgtgtggagggcatctncagggctaccatcantgatnttgatncccatcagggcantgnncatnanctacacttnatggacgacaagcgnntgtncatcatggatgtctacaaccgccacatntacccaggggacccnntgtgccaatgttngcgatatgcctgggagtncgnttttaaggttgtcaaagtagccaatgtttctcttttggccctatacaaggggcnatgaaggaaanaccangatcataaattttnatggtgaaaaacactggaggtaataaactttcattgccaaagnaaaaanaaaaagggnggccgctanctagtntagagaaaaaaaccttccacacctccccctg

SEQ ID NO: 1302 - DNA, 1160 bp, Homo sapiens
  misc_feature (1)...(1160): n = A,T,C or G
cgccccgccccgcccggtcgcggagcccccgccagcttacgcatggccggccccgggatgctacacacaacccagctgtaccagcatgtgccagagacacgctggccaatcgtgtactcgccgcgctacaacatcaccttcatgggcctggagaagctgcatccctttgatgccggaaaatggggcaaagtgatcaatttcctaaaagaagagaagcttctgtctgacagcatgctggtggaggcgcgggaggcctcggaggaggacctgctggtggtgcacacgaggcgctatcttaatgagctcaagtggtcctttgctgttgctaccatcacagaaatcccccccgttatcttcctccccaacttccttgtgcagaggaaggtgctgaggccccttcggacccagacaggaggaaccataatggcggggaagctggctgtggagcgaggctgggccatcaacgtggggggtggcttccaccactgctccagcgaccgtggcgggggcttctgtgcctatgcggacatcacgctcgccatcaagtttctgtttgagccgtgtggagggcatctccagggctaccatcattgatcttgatgcccatcagggcaatgggcatgagcgagacttcatggacgacaagcgtgtgtacatcatggatgtctacaaccgccacatctacccaggggaccgctttgccaagcaggccatcaggcggaaggtggagctggagtggggcacagaggatgatgagtacctggataaggtggagaggaacatcaagaaatccctccaggagcacctgcccgacgtggtggtatacaatgcaggcaccgacatcctcgagggggaccgccttggggggctgtccatcagcccagcgggcatcgtgaagcgggatgagctggtgttccggatggtccgtggccgccgggtgcccatccttatggtgacctcaggcgggtaccagaagcgcacagcccgcatcattgctgactccatacttaatctgtttggcctggggctcattgggcctgagtcacccagcgtctccgcacagaactcagacacaccgctgcttcccccttgcagtgccctgacccttgctgcctgcctgtcacgtggccctgcctatccgcccttaatgctttttgntt

SEQ ID NO: 1303 - DNA, 313 bp, Homo sapiens
  misc_feature (1)...(313): n = A,T,C or G
ngtcgacccacgcgtccgcccgcgtacggnganggggacaagccccccnaccnaatgaaggggancncncngancnggcntgaaacntatnannnanggngtcngnntgcnanctcatntncctgtnnctgcctggctgcaggctntgnnctacggctgnnnnangcacnnangggngctganntnngaannggnntgnncggnntnaggcctcctggacaccatgctcagtacaatcttatggntgggtattgcatgtacaaccatctggctgtggctgcccgntntgcgcaaaanaagcaccnnattcaga

SEQ ID NO: 1304 - DNA, 402 bp, Homo sapiens
  misc_feature (1)...(402): n = A,T,C or G
acttttcattttccttatttgcttcggncttccacctcatttttttccttttgngnnttctgtttcacccattccccaaaaatcatnaaagtcnccagtggcagcaccnccaccgccnccgcgggccccanctgcncccctaaaggccggcaaaacancnaaccggtccngccaaggtggtccccctttctgtctaancanancntggccatctcgggctgcnccngggnccccggggcccccctgcctgccctgctgnacaancancangtaaacttcctgctctacaacatgaacggctgttactcacncctcaaggagctggtgcccaccctgccccaaaaccncaaggtgancaaggtgganattctccancacgtcatcnactacatcagggacctt

SEQ ID NO: 1305 - DNA, 1042 bp, Homo sapiens
  misc_feature (1)...(1042): n = A,T,C or G
cttctttggagggaaaacagggaactctgtgtccacnnntannatttttttttttttttttgacaccagtacagtttattcacaaataaataaattcacattaggcagagcctcctgcttgcctcaaagtgtctagccctatgggtccctccatggagggaggggctgaaaagggccgccgcggtggggacggctctcacccgcaggaatgcccccgtcgggatcgcccgtgccctcttccaggaaaggcagtctgccaaggaaccacttcgaaggtgctgaggccaaaaagcctcggtgctcacagagacggcgtcagttgtcccttgtcacttgggctcctcaggcagccactccagaggcgagaggggcatccaggtctccaacagagccagcacgtcgcccggaaggagcggggacggtgggcttggctccatcgcctgcccttccgggcacgccgcctcggccaacagcgcaggcgggtcgcgcggctcgggtgcagctcgggctccggggcaggcaggcggggatccccaggacgccccggcgcggacggcggataccaggcccagcccgcgcccctgcccctgcccctcagcctgcgtccgtgtctgcatctgcgcggggcagtcgtcggggcacagcgggcagccccgaggggaccccgcgtcaccgcgctgccggcaccggcgctggagactctcctcgctgaggcctagcacggccgacaggtggccgatatagcggatagccaggcgcagcgtctcgatcttgctcacgctctgtccaccgggcgccacggacggcggtagaaagcggcgcagctcgtgcagggcgcgggccagcgtgcgcatgcgcagtttctcccgctcactggcgctctgcctctgcccgctgcccaggcggctgctgcgcgcgccgcgcctacctacggagggggcgcgggggtcccggagggtgcctggccgcgcggggctcggcacggggctgtcggctggggtgctgccccatgagtctggggacgagacgagggagcggccgc

SEQ ID NO: 1306 - DNA, 1670 bp, Homo sapiens
  misc_feature (1)...(1670): n = A,T,C or G
cgcgtccggatcttttttctgtcggataaagagttgtaaaatctctgtcaaagaagagcatggatgcttacccaactcaaagaagaaagagcacagaaaattctatactatccattgcactggttacttgagaagctggcctccaaatattgttggaatggaagaagaaaggaacagtaagaaagacaacagtaattttacctgccttgtggccattggaagattacagccatatattgttccacagaacagtggacacactaacgccaaaccaactgaatttataacccggtttgcacgtgaatggaaaatttgtctatgtagatcaaagggcaacagcgattttaggatatctgcctcaggaacttttgggaacttcttgttatgaatattttcatcaagatgaccacaataatttgactgacaagcacaaagcagttctacagagtaaggagaaaatacttacagattcctacaaattcagagcaaaagatggctcttttgtaactttaaaaagccaatggtttagtttcacaaatccttggacaaaagaactggaatatattgtatctgtcaacactttagttttgggacatagtgagcctggagaagcatcatttttaccttgtagctctcaatcatcagaagaatcctctagacagtcctgtatgagtgtacctggaatgtctactggaacagtacttggtgctggtagtattggaccagatattgcaaatgaaattctggatttacagaggttacagtcttcttcataccttgatgattcgagtccaacaggtttaatgaaagatactcatactgtaaactgcaggagtgtgatggtgcacagttggatttcgatgccctatgtgacaatgatgacacagccatggctgcatttatgaattacttagaagcagaggggggcctgggagaccctggggacttcagtgacatccagtggaccctctagcctttgatttttaactccaaaaatgagaaacattttaaagcatttcatttacgaaaaactgtctcaactattcttaagtactgtattgatattgtttgtatcttttattaatgttctaccactttttatagatttgcatcttcctgtcacagggatgtggggaaatacgttttcctcccaagagaaccaagtttattatagactcctttattcagtgaaatggcttataatccactagttgccatatttttgctaaaatatttctaaccaagaatactacttacatactgttttggctttgttttatttttgatgcagttttttttagttgaggtaatgtaatatattgatgttttcctttgtgtctaagattcatttataatagtaggtttgtataatttggaacattttccattccttgcgaatttccttaattgaggatagggcttacacactttaagaaaacagtgagtacttgaacatttaaagggacagtgcaatttatagtcataatcacattgaatactgtatttgatctttggagacttangcaagcacagagctgggatatttatgctcagttgagcactttaagatgaattttaagtgagatgatttcttgcttaaaactcagaaagtcaaaagagtttcagctttccttacagaaaaggaagggatcttgggccctagatcttgg

SEQ ID NO: 1307 - DNA, 500 bp, Homo sapiens
  misc_feature (1)...(500): n = A,T,C or G
acncgtccgggcgaggagcgaggagcgaggggcgaagggcgaggccgagcagccagatggccaggccgctgtccacccccagctcttcgcagatgcaagccaggaagaaacgcagagggatcatagagaaacggcgtcgagaccgcatcaacagtagcctttctgaattgcgacgcttggtccccactgcctttgagaaacagggctcttccaagctggagaaagccgaggtcttgcagatgacggtggatcacttgaaaatgctccatgccactggtgggacaggattctttgatgcccgagccctggcagttgacttccggagcattggttttcgggagtgcctcactgaggtcatcaggtacctgggggtccttgaagggcccagcagccgtgcagaccccgtccggattcgccttctctcccacctcaacagctncgcagccgagatggagccttcgcccacgcccactggccctttggccttcctgcctggccct

SEQ ID NO: 1308 - DNA, 758 bp, Homo sapiens
  misc_feature (1)...(758): n = A,T,C or G
agaattcggcacgaggcgagcggctccgacggggagtccgacggacccatcgacgtgggccaagagggccagctgagccagatggccaggccgctgtccacccccagctcttcgcagatgcaagccaggaagaaacgcagagggatcatagagaaacggcgtcgagaccgcatcaacagtagcctttctgaattgcgacgcttggtccccactgcctttgagaaacagggctcttccaagctggagaaagccgaggtcttgcagatgacggtggatcacttgaaaatgctccatgccactggtgggacaggattctttgatgcccgagccctggcagttgacttccggagcattggttttcgggagtgcctcactgaggtcatcaggtacctgggggtccttgaagggcccagcagcccgtgcagaccccgtccggattcgccttctctcccacctcaacagctacgcagcccgagatggagccttcgcccacgcccactggccctttggccttccttgcctggccctggtctttctttcatagctgtccagggcttgccagccctgaacaaccagcttgccattctgggaagagtgcccaaccctgtccttcccggngtcttcttttctgnttaccccattccaacccttccgaaccggttccccnttttgcaaaaggccacaaggcanttaattccttgnccagnccccgggnggaaatgttgctttgcccaantttcgaagggggggccaatttt

SEQ ID NO: 1309 - DNA, 676 bp, Homo sapiens
tttttttaagggtaaacaagctttatcccacgtaaatggcaatgcagatataataagcaaatgatataataaggaaattaatataataagcaaattgatataagtaaatgacataataagcaaattgcaatgggaaggggagaagggaaaagagatatacaaatatttacactcaccagactatggaggattcaccaccagactgggaagcaacagcctgggctccagagtcggccactcatccatgcacagatgaggagaggtctcatgaagcttcagcgcaactaccacactaactcactccctaaaaacaattctcccaaaatcaactgccacgactcccccacaaaataatcctgtcccaccagtggcatggagcattttcaagtgatccaccgtcatctgcaagacctcggctttctccagcttggaagagccctgtttctcaaaggcagtggggaccaagcgtcgcaattcagaaaggctactgttgatgcggtctcgacgccgtttctctatgatccctctgcgtttcttcctggcttgcatctgcgaagagctgggggtggacagcgggcctggccatctggctcagctggccctcttggcccacgtcgatgggtccgtcggactccccgtcggagccgctcggctccttgggtcgcttccggacgcg

SEQ ID NO: 1310 - DNA, 630 bp, Homo sapiens
  misc_feature (1)...(630): n = A,T,C or G
gcgtccgccccgcgtccggcgccgccgccggagccgcgcctgcccaggcccggggacgggacggaggcgggcgtcagggtgctgcgccccgctcggcgtccgagcttccggccgggctgtgccccgcgcggtcttcgccgggatgaagcgcccctgcgaggagacgacctccgagagcgacatggacgagaccatcgacgtggggagcgagaacaattactcggggcaaagtactagctctgtgattagattgaattctccaacaacaacatctcagattatggcaagaaagaaaaggagagggattatagagaaaaggcgtcgggatcggataaataacagtttatctgagttgagaagacttgtgccaactgcttttgaaaaacaaggatctgcaaagttagaaaaagctgaaatattgcaaatgacagtggatcatttgaagatgcttcaggcaacagggggtaaaggctactttgacgcacacgctcttgccatggacttcatgagcataggattccgagagtgcctaacagaagttgcgcggtacctgagctccgtngaaggcctggactccttcggatccgctncgggtgcggcttgtgtctcatcttancacttgcgccaccc

SEQ ID NO: 1311 - DNA, 429 bp, Homo sapiens
  misc_feature (1)...(429): n = A,T,C or G
aggagttcgagaccagcctgaccaacatggtgaaaccctgtctctactaaaaatacaaaaaaaaaaaaaaaaaaagtgctactctgagggaactctgaccagcatttgctcatagaacaaacgcacgcagtacaatctcaatcgagtaaaaagtctgtaaggaaatacctcagaatgtcagcagggattcttcctgggggatgagatttaggtggttttgttttactttcttgtagctttctgaagtttccctcgtttttatgagtgtgcactaattcctctgataattgggggcagggggagtngaagtctatatcaaaacaaaaagcccggagcaaggccagtgacccattaacacccttttatatacttagggagattttgcagctgctgccggcaacctacaaacctgcctggcagttttgggcc

SEQ ID NO: 1312 - DNA, 470 bp, Homo sapiens
cgtccggctggtgctgataacagcggaatcccccgtctacctctctccttggtcctggaacagcgctactgatcaccaagtagccacaaaatataataaaccctcagcacttgctcagtagttttgtgaaagtctcaagtaaaagagacacaaacaaaaaattctttttcgtgaagaactccaaaaataaaattctctagagataaaaaaaaaaaaaaaaggaaaacaccagcccatataatgctacaccagccagtgtcaacacgacaccggataaaccaaagacagcatctgagcacagaaagtcatcaaagcctattatggagaaaagactaagagcaagaataaatgaaagtctgagccagctgaaaacacttgattttggatgctctgaagaaagatagctcgcggcattccaagctggagaaggcggacattctggaaatggacagtgaagcacctccggaacc

SEQ ID NO: 1313 - DNA, 470 bp, Homo sapiens
  misc_feature (1)...(470): n = A,T,C or G
cacgcgtccgcccgngccgcgcccgggacctcanttcggacctcggtttccctttgcgtggggctcgcagctgccaccgnttccccgcggagcatggggctgcctcgccgggnnggggacgcggnnggagctgcgcaagagcctgaagccgctgctggagaagcgccggcgcgcgccatcaaccagagcctgagccagcttaaggggctcatcctgccgctgctgggccgggagaactccaactgctcgaagctagagaaggcagacgtcctggaaatgaccgtgcgcttctgcaggagctgcctgcgtactcatggcccacggcagcgccccgtgagtgagccctccctgccctgccgcgcgctctgcaccccgcacccggcaccctaccccgcgccttacgcggctntccgccgcagtgccttgcgacagctaccgcgagggctacagcgcctgtgtggcgcgcctgg

SEQ ID NO: 1314 - DNA, 545 bp, Homo sapiens
  misc_feature (1)...(545): n = A,T,C or G
cgtccgcttccccacaggagggcccagttgaagcggngcctggagcggctgaagcagcagatgcccctgggggccgactgtgcccggtacaccacgctgagcctgctgcgccgtgccaggatgcacatccaggtgaggccccccactgcgcccggactggcttgccctggtgtatggagggctgtgctatggaggggctggtgggactggggaacgagacctgaggtcagctcaagaactgtgtgacttaggacagctctctgagcttttactttccagatccattaaatgggaagaaaagcagacaataactcagagggttgttgaggcttaaatgagttcactctataaatgttcactgttgctgttacagctgttatcacttagatcacagctgtgagaccttgggcaggttacttagcctgtctggactaaccttccctcctgtttgaggggagggggatggctgttgaattcttgtgatgggatgtatgggggggggtncttgggactgnanaggggtttggtccttgcttttccccctt

SEQ ID NO: 1315 - DNA, 495 bp, Homo sapiens
  misc_feature (1)...(495): n = A,T,C or G
cccgtcctctcctggcgaacgccagggancggacgcgggtgcacaccatcagcgcagccttcgaggcgctcaggaagcaggtgccgtgctactcatatgggcagaagctgtccaaactggccatcctgaggatcgcctgtaactacatcctgtccctggcgcggctggctgaccttgactacagtgccgaccacagcaacctcagcttctccgagtgtgtgcagcgctgcacccgcaccctgcaggccgagggacgtgccaagaagcgcaaggagtgactggctgcaggcaanaccaaggccaccactgtgggccctccttccagtcaggcctgaggacaaggtgagctcgctgaatccagcctcgtggtcttctccaagatgccgccagatgcccagcctacagcctctcaaggtcggatcggancacgcctgcctccctctcccctccgccctcaccaagccaatccgaagctgcttcgcactttgccctctt

SEQ ID NO: 1316 - DNA, 714 bp, Homo sapiens
cccacgcgtccgctcgcatcttgctgtgcgcaccgcccgcgcgccccgcgccgtcagcacccccagcaccggcagcgcccccggagtccactgtgcgccctgcgcccccgacgcgccccggggaaagttcctactcgtcaatttcacacgtaatttacaataaccaccaggacccccccgcgtcgcctaggaaacgaccgggcgaagcgactgccgcctcctccgagatcaaagccctgcagcagacccggaggctcctggcgaacgccagggagcggacgcgggtgcacaccatcagcgcagccttcgaggcgctcaggaagcaggtgccgtgctactcatatgggcagaagctgtccaaactggccatcctgaggatcgcctgtaactacatcctgtccctggcgcggctggctgaccttgactacagtgccgaccacagcaacctcagcttctccgagtgtgtgcagcgctgcacccgcaccctgcaggccgaggggacgtgccaagaagcgcaaggaaagttcttctgcacggccttgactgactccgaggtttgcaaacatccactggcttcagtgaaggaaggggtttgaccactggccctaccttgctcctgacctggggcctgtggggcaactgtctgcacagcacggctgaggcctgttgccagtcccctcctctctggtgagcagccttgagaaatacagaaag

SEQ ID NO: 1317 - DNA, 380 bp, Homo sapiens
  misc_feature (1)...(380): n = A,T,C or G
gcatggcgctctgaagacgccggcgcccgccgccttgaggagccgctgcccccgctccctgaagatccgggaacaatgaaataagcgagaagatccctcttctcccccctctctctcttgccccctccccccctaccctcccctctccccttgactcctctccgaggcaccatgctgacccgcctgttcagtgagcccggtcttctctcggacgtgcccaagctcgccagctggggcgacngtcgaatacagacgagccgaggagcgacaagggcgacgcgccgtcaccgtcaccgactgcgcccgtgccaggggctccggggccagcccgggcggacaagccagtccctctccgtggagaagaggggacggaggccacc

SEQ ID NO: 1318 - DNA, 280 bp, Homo sapiens
  misc_feature (1)...(280): n = A,T,C or G
gacccacgcgttcgcggacgcgtgggtttgtggttggatgtgaaagaggaaaantnctcttcgcttctaagtcagtctccaaantacttaattatnatcaggctagggttgactggacaaagcttattcgacttattacatccaaaagatgttnccaaancaacnggaacaactttcttcttttgatatttcaccaagagaaaagctaatagatgccaaaactggnttgcaagttcacagtantctccacgctggaaggacacgtgtgnattctggctca

SEQ ID NO: 1319 - DNA, 930 bp, Homo sapiens
  misc_feature (1)...(930): n = A,T,C or G
cgcccccgcgtcccggggaggtaaagtgttgagaggaggagaaccagtgcattgctcctgtggtttccagcccgcgtgagtccagggacaagaccaacagctatggggtctttcagctcacacatgacagagtttccacgaaaacgcaaatcaagtgattcagacccatcccaagaagctcatagccaaactgaaaagcggaggagagataaaatgaataacctgattgaagaactgtctgcaatgatccctcagtgcaaccccatggcgcgtaaactggacaaacttacagttttaagaatggctgttcaacacttgagatctttaaaaggcttgacaaattcttatgtgggcaagtaattatagaccatcatttcttcaggataatgagctcaagacatttaatccttaagactgcagaaggcttcttatttgtgggttggacatgaaagaggaaaaaattctctttcgtttctaagttcagtctccaaaatcttaattaatgatcaggctagtttgactggacaaagcttattttacctcatacacacaaaacaaccttcaaaagtaaataaacaacttcctcacatatataattaacaaaaaaaaaacctaatataatacaaaacaattctttagaagttctgaaggntgagctgggcgtggggggctcatgcctggaatnccccgtactttgggaagctgaggtgggccggatggcttgantccaaaattcgaaaccagcctnggccaaaaaaatgcnaaaaattaancnagggggggccttgcctgcttgnaaggccancttcctggggaggcttgaggggggaagaaccgcttgaanccttngaaggnggagggttcaattnnccataaattttggccacttggactccancctggggggacaagcctggcttaaaaaaaaaa

SEQ ID NO: 1320 - DNA, 414 bp, Homo sapiens
  misc_feature (1)...(414): n = A,T,C or G
cctcaacgttagcttcaccaacaggaactatgacctngactacgactcggtgcagccgtatttntactgcgacgaggaggagaacttctaccagcagcagcagcagagcgagctgcagcccccggcgcccagcgnggntatttnggaanaaattggggttgttnccaacccncncnttntcaaaaccccctcccgggtttttnccccctnnttnnggtgggganccctttttttttttttggggaaaaancangggggggggggnnnggngtttttcncccnccccccccttttgngaatgnngtccccctctttnnggnggggnaaattgttnaaacantnttttttttttggccccccggnggagnntctnttataaaaaaaatnttttctnncnnnnnggnnngggggggg

SEQ ID NO: 1321 - DNA, 368 bp, Homo sapiens
  misc_feature (1)...(368): n = A,T,C or G
ggaccgcgacagaaagacagcgattcgcagttaggaggtggccggcagcagccaggaggcagacgctgctgggggaggtggacgcccggggtgactgcagacagcccccaccttggacctgagctgggcaaggcccaccgcaagcatgcccccagccagccctggctgcagcggggccgaaggacaagacggacgtacagacaggcgccggcagcgggactctgcgctggccccancacctgcccggcccactggaactttcttgcgctggcttttcttccngccactgtgttatggcatcttgtgtttttgatatgataatataaagcctgaaaattttgaaaattaaaacaaacatttttcaaaaa

SEQ ID NO: 1322 - DNA, 230 bp, Homo sapiens
  misc_feature (1)...(230): n = A,T,C or G
gcgcgctccgctcctccatcaatgacaaaatcattgagctcaaggatctggtggtgggcactgaggcaaaggtgtggagaggcctgcaggggcacagaccggggtgtccctaggaaggaacagatcaggggcaactggaaggaagagagggagtgagactgagcctgnacaaggacttttactttttattacataaaaatattaaaaaataaataaaaaaaataaaattt

SEQ ID NO: 1323 - DNA, 261 bp, Homo sapiens
  misc_feature (1)...(261): n = A,T,C or G
ncgcgtccggcaacatgggcacggagcctgctgcccggggcagcctccccggcaacttccgaaagatttccaagccgctgatggagaaaaagcgccgggcacgcatcaatgtgtcactggagcagctcaagtcgctgctggagaaacactactcgcaccagatccggaagcgcaaattggagaaggccgacatcctggagttgagcgtgaagtacatgagaagccttcagaactccttgcaaggtataggggagggctgga

SEQ ID NO: 1324 - DNA, 311 bp, Homo sapiens
  misc_feature (1)...(311): n = A,T,C or G
cncgtccttttncagtctatnctacatcagcaagcactatgcnactncaatangcnctcctacatcactatgggttgctgcaanccagcaancatnactntccntagntccttattnatccaaganngccatcacagcagntacccttnnagctacttcantgagangaatcaccctngntatgcactgaatgttgggcatctcttttcatattncacatncnancagctactgangnnngcatncacatgaacgtttgagctatccatcacactcctcatcagacatcaattccanncttcctccgatgt

SEQ ID NO: 1325 - DNA, 820 bp, Homo sapiens
  misc_feature (1)...(820): n = A,T,C or G
cgggttcaacgcactctctttaatgggaaggggatcgtcatttcttacagcaataggtaaaaacataaatacgggtgggtgcgtgggcgggcgacggcgagatagcaaaggcccgggcgcccggccctggctcgcggaatgggcggccagatctcaggccctgcgtgcccgagctcagtcccagttccaaccgggggtgcccatggactctcggagggcactcctggggggacagctaagacaccaggctgcaggatcactcattgcacgctgcataatcgccgccacaaactctcccgtgcgcaagaacaaacgcgcgtgggacagaaaaagttcctaggtctccgcaggagtgaatgcaaaatccaggggactcagggtcatgttgggagccccttctccccccgagagtcagggagctgttgaggtgggatcggtcagggtcgcgccacgcgggtcccttccctaccaggctcggataccatgcagcgtggacactcccgagttgctctgcggaatccccgngctctgaaccgcattcaagtccccgacgccgaagttcacgaagttgttgttggcggcggcagtggccgcctgcgctggggaaggccccgcngngtaagcgcagtgcagctgtaccaggctgcaggccgcgcccgcgtaacccgataggcgngtagcgtattaccgtaggattgaggccaccgcgtagcaggcgcgtagggcgccgatncccctagcatggctgccatcgcgcacagcactggcaccgcgatcctgcgggcagcgggggggggggcgggggccagcccaccagctc

SEQ ID NO: 1326 - DNA, 641 bp, Homo sapiens
  misc_feature (1)...(641): n = A,T,C or G
tccgacaaaacccagacccccaggtcccggccaatggaggcgatttagactggagtgggacccgcgtctgtcaaaagcccgactccgcagcagcggcggagtccaggaggagagctggagccgccgcgctgcctccccgcccccgccgggatttattatttggactggacaattaagtgnccctgatnatgttaccaagcccggtcacctccacccctttctcaagtcaaagacattttgaatctggagcagcagcaccagcacttccatggtgcgcacttgcaggcggacttggagcaccacttccactctgcgccctgcatgctggccgccgctgaggggacgcaattttctgacggaggggaggaggacgaggaagacgagggcgagaaattgtcctatttgaactcactagccgcagcagacggccacggggattcaagggctgtgttccccagggctatgtccacacggtcctgcgagaactcgtgcagcgagcccaaggaacatgaagaggaacccgaggtcgtgaggggaccggagccaaaaaaactacaagctgaaaaagtctctagagacggccggagactgcaaggcggcggaggagagcgagaggccgaagccacgcagccgccggaagc

SEQ ID NO: 1327 - DNA, 469 bp, Homo sapiens
cgtccgccagccttcagcgccagcaccttccaaacctttccttctgagcaccccgccattctactcggcgtgctgcggtgggtcctgtcggcgccctgcatcctccactgcttttccaagagaagagagcgtgctgcctctcctgacacaggactctaattccaaagctcggaggggcattttaagaagagctgtcttttctgaggaccagagaaaggctctggagaaaatgtttcagaaacagaaatatatcagcaaaacagaccgaaagaaacttgccatcaacttgggactaaaggaatcacaggtgaaaatttggtttcagaacaggaggatgaaatggcggaattccaaagaaaaggaagtgctttccaacaggtgtatccaagaagtaggtcttcaagaggatcccctctcacggtctgctctgggtttcccttctccatgtccttcaatatgggacgtcccc

SEQ ID NO: 1328 - DNA, 835 bp, Homo sapiens
cacgcgtccggcctcatgttattatgcaggcaactcactttatcccaatttcttgatacttttccttctggaggtcctatttctctaacatcttccagaaaagtcttaaagctgccttaaccttttttccagtccacctcttaaattttttcctcctcttcctctatactaacatgagtgtggatccagcttgtccccaaagcttgccttgctttgaagcatccgactgtaaagaatcttcacctatgcctgtgatttgtgggcctgaagaaaactatccatccttgcaaatgtcttctgctgagatgcctcacacagagactgtctctcctcttccttcctccatggatctgcctattcaggacagccatgattcttccaccagtcccaaaggcaaacaacccactactgcagagaagagtgccacaaaaaaggaagacaaggtcccggtcaagaaacagaagaccagaactgtgttctcttccacccagctgtgtgtactcaatgatagatttcagagacagaaatacctcagcctccacagatgcaagaactttccaacatcctgaacctcagctacaaacaggtgaagacctggttccagaaccagagaatgaaatctaagaggtggcagaaaaacaactggctgaagaatagcaatggtgtgacgcaggtaacaggaaacttcattctgttctttcctttcagtgatctttcaatcttgtccatccctgaaacacacaactccagtcacagacagttctggttgtccttgtaccctttctgttaatctctccttctcttttgagaaggccttagcacctacctaccccag

SEQ ID NO: 1329 - DNA, 356 bp, Homo sapiens
cacgcgtccgaaaaaagctgccagctgaagaagtctctagagacggccggagactgcaaggcggcggaggagagcgagaggccgaagccacgcagccgccggaagccccgggtcctcttctcgcaagcccaggtcttcgagctggaacgcaggttcaagcagcagcggtacctgtcggcacccgagcgcgagcacctcgccagcagcctgaagctcacatccactcaggtgaaaatctggttccagaatcgcaggtacaagtgcaagagacagcggcaggacaagtctctggagcttggcgcacacgcgcccccgccgccgccgcgcccgcgtggctgtcccggtgcttggtgcgg

SEQ ID NO: 1330 - DNA, 281 bp, Homo sapiens
  misc_feature (1)...(281): n = A,T,C or G
ccctggctgcatgaattcggcacgagccggctccccggttaccggggcgcgagtatgaccacaatggcggccgccaccctgctgcgcgcgacgccccacttcagcggtctcgccntcggccggaccttcctgntgcagggtctgttgcggntgctgaaagncccggcattgcctgtattgtgcagcggctgccgangctggcctaaaaancactgncccactgagaacganccanacttggcccagtgntttcttgttgcttcaaggagctggaaggctgg

SEQ ID NO: 1331 - DNA, 332 bp, Homo sapiens
  misc_feature (1)...(332): n = A,T,C or G
cacgcntccgcccnntggnngaggtggcggtggnngcntgggtgnccngacnttgncccctncctggnagtcntttgtcaaggaccaccggatctntacattcaaggaactggaccttcttggagggctgcgcctgcacccngnngcgnatggccgnggctggnttcatccantgtnccactgnnaacgagccanacttggtccantgttnnttntgctataagganctgtaaggctgngagccagatgacgacccnatagaggaacataaaaagcattcgttacggttgcgctnnnntttctgtcaagaaacagtttgaagaattaaccct

SEQ ID NO: 1332 - DNA, 409 bp, Homo sapiens
  misc_feature (1)...(409): n = A,T,C or G
ccacccacgcgtccgtgaagatcagctatnataagagaaagatcagttaagtccttacggacctgatcagcttgatacangaactactganttcaactnntggnggctnaattctntnggaaacgannaaatatacaagttatatcttggcttntcagctctgcatagntnngggttctnttggctgttactgtgcangacncatattgtaaaatgaancaagaaatacctttangcataaattttaactggcatngtacatttcatnttntaggccnggantgaaatcgcgnaaacctcnttntcnccttcaccgccgntttttttngaaaccaaatttnggnaaaaagangnggantatggtggacttngnnaacacaaaattnaaattgnccagtaangccccaaa

SEQ ID NO: 1333 - DNA, 614 bp, Homo sapiens
  misc_feature (1)...(614): n = A,T,C or G
gcgtccgaaaaactttaggaaaagaagttttattactgatgcaagccctaaacaccctttcaaccccacaccacaanctggcagctctctgtaagaaatatgctgatcttctggaggagagcaggagtgttcagaagcaaatgaagatcctgcagaagaagcaagcccagattgtgaaagagaaagttcacttgcagagtgaacatagcaaggctatcttggcaagaagcaagctagaatctcttttgcagagaacttcagcgtcacaattaagaccgttaaaggaggaaaatatgcagcangcacnagaggaagaagaaccgacgtaaagaagcaactgcacatttccagattaccttaaatgaaattcaagcccagctggagcagcatgacatccacaacgccaaactccgacaggaaaacattgagctgggggagaagctaaagaagctcatcgaacagtacgcactgagggaagagcacattgataaggtgttcaaacataaggaactgcaacagcagcttgntggatgccccaaaactgcaancaaacgacacaactgataaaaggaagctgntgaaaaacatcanagagagagaggaggttttttntt

SEQ ID NO: 1334 - DNA, 492 bp, Homo sapiens
  misc_feature (1)...(492): n = A,T,C or G
cgtccgctgatgaagcagcaagagacccacctgaagcaaananttggccctatncacaganaagttggaggagttccagaacacactttccaaaagcagcgaggtattcaccacatgtgcaatcctcaagatttgtcctgattctatttcctggcacctccctgcctgtccttggggattctacttcttcctgtgtgggagcccatagctgttgtctaacaggtaagaaatgaaattgaactattgactgggccccagaaatccataaaatggctgcagacagttgtttctgtgtcctgttctacccccactccagtacataactactatgtactgtgtagagccattctatatgctgaatgttctgctgttgcaaacttgccagggtattagccagtgtttgtgccaagcagttttctgggacaacagaatgactcagaccaagatggataggatggttaggggctttgcttttgctgtttttctttgaaa

SEQ ID NO: 1335 - DNA, 512 bp, Homo sapiens
  misc_feature (1)...(512): n = A,T,C or G
cgccccgcgtccgcccggacagcgaagccccaggccggacaagcgcttaggggacaccaggctgagtgtttatcatggcttccagccacaccgtgttgatgcggctggtagcttcagcatattctatcgctcaaaaggcaggaaccatagtcagggtgtgtcattgctgaaggagacctgggcatcgtgcagaagacctcggccaccgacctgcagaccaaagccgaccgcttggtgcagatgagcatatgctcttccctggcccggaagttcccgaagctgaccatcataggggaagaggacctgcctcctggggaagtggatcaagagctgattgaagacgggcagtgggaggagatcctgaagcaagccgtgcccctcgcagtacaagtgctatcaaggaggaagaccttgtggtttggggttgaccccttagaatggcaccaanggagtacactggaaggtcttcttgacaatgtaacagtttcttcattgggattgcttatgaagga

SEQ ID NO: 1336 - DNA, 735 bp, Homo sapiens
  misc_feature (1)...(735): n = A,T,C or G
ccgcccacgcgtncgcggacaacttccccagataccccgtgggcaagttcttccaatatgacacctgggaagcanttaacccagccgcctgcncaggggccctgcctgccctcntgggtgcccncngggntcacntgctcncnaaggangctnnnaaggcgttcaaggnaggccaaacgttnccggtcccttgattgttttaccaacccaaaaccccggncnnctggnggggnnccccccaaanaanatggccttttantttcggnaaagtganncaaaaannttggcccntanangttttaaaaatcctnnggcgcccacannntcnnttgaaananntnntctnttttganannaaggggaagntttntccanttaaggggttanccntcccaaaaaanattttttntnggnttccaacnttccccnntngggngttttttttttnaannacncaaaantnccccagttggtccccgcntttttccaaanaaaaaaangnngttttttttttttngggggccccnctantananggggggntgggnnnanaaaaannaacntattttttttttaaaaaagtnntggaaaaaaaaaaatggggggnngttttaaaaacnccctttanaaaaanancncccccccccaaaattaatttnnanntttttttccccccccntttntaataatttttnaaatttttttatnggannncanctttttttcccccccccn

SEQ ID NO: 1337 - DNA, 325 bp, Homo sapiens
  misc_feature (1)...(325): n = A,T,C or G
gcgtccggccnggcnacngngnntgntnacttgctncctnctntggagatggaccgntggcnaacatgnntcccanntcggnncaactccnggagatctcnngngggnngtgactgactggaanccaatgcctacaggccnaaacngagtngccccaggnacggatcagctgcncntaaagcnccnctgcctatcgcncctnctgctactactttaatgaagaccgtnagacctgggttgatgcngatctctanngccncancatgaatncgggccncctggtgtctgtgctcncccaggccnagggtgcctttgtggcctcact

SEQ ID NO: 1338 - DNA, 467 bp, Homo sapiens
  misc_feature (1)...(467): n = A,T,C or G
ttgcacgagagccaacagatnttgttggggggcctcttaagcaagagatgtgattgcnnctcancatggctcanaccanctcatacttcatgctaatctcctacctaatgtttctatctcaagagccaaagccaagangcccaaacagaattaccccaaacccnnatcaactacccanaaagcaccaatgcctatcactcctactgctactactttaatgaaaaccntnaaacctgaattnatacagatctctattgccaaaacataaattcnangccaacctgatatctatactcacccaaacctaaaatncctttataacctcactaattaaagaaaatngcacttatnacttcaatatctaaattnacctccataaccccaaaaaanaacccccngtnacactaaaacaataaagtccctnagtctcctacaaantnctgaacattanaaccccaaacaatatt

SEQ ID NO: 1339 - DNA, 758 bp, Homo sapiens
gacaatggggctagaaaaacctcaaagtaaactggaaggaggcatgcatccccagctgtccttcggttattgctgtagttttcatcttacttctcagtgtctgttttattgcaagttgtttggtgactcatcacaacttttcacgctgtaagagaggcacaggagtgcacaagttagagcaccatgcaaagctcaaatgcatcaaagagaaatcagaacttaaaatcacttaagggagcacctggaactgttgtcctattgactggagagccttccagtccaactgctattttcctcttactgacaacaagacgtgggctgagagtgaaaggaactgttcagggatgggggcccatctgatgaccatcagcacggaagctgagcagaactttattattcagtttctggatagacggctttcctatttccttggacttagagatgagaatgccaaaggtcagtggcgttgggtggaccagacgccatttaacccacgcagagtattctggcataagaatgaacccgacaactctcagggagaaaactgtgttgttcttgtttataaccaagataaatgggcctggaatgatgttccttgtaactttgaagcaagtaggatttgtaaaatacctggaacaacattgaactagaaactcagaaagtggtccttgtgatggaaagagaaaagaaaaaacaattagaataaggcagaatgtacgtgcgtcattggaacacagaaaacatgctggttcatacag

SEQ ID NO: 1340 - DNA, 669 bp, Homo sapiens
  misc_feature (1)...(669): n = A,T,C or G
tgnctacctggatgtnttctgccctcactntgaggactccnnccnanaagataanactgncgctatgtnctctacatggggaactttgatgggctacagngcctgcgaccacactnccaaaggggtcaaagagatgggaatgtgaccggcctnactcttcaaatggaccgatgagttctctgaaaaattccagctnttcactccttttntctaggatttgaantcaggccaggccgagaatatttgtacattcttctntgcaancccagatatggaagaagggnctgtttaagctcaaagtctttgtgagaacnaccaaaaantgnntganaactatagggggtcatgaaccctggtttcctgntaaccgacnnngtatnaaattnnttnacaaccccgngggatgacacccgtccttnagtcancccgaggcattccgcggcgggaacnctgnacaaacacccgaggntacccncccnccttttgggaaatctantngtnctcctggngnagggntttgacaatataagacaangcttnttccattnnattgggaaaaaaaaannttaggggtgttgggnccccccaangccccttaactggtcttcncanaangggncttggtatttngggtttggcacanatgcaaaanattttgttttttttttt

SEQ ID NO: 1341 - DNA, 224 bp, Homo sapiens
  misc_feature (1)...(224): n = A,T,C or G
ctggccaggccccntgctatggngtnnctctngnnccgtctctggggtctgngctgcannctggccgctgctgatcgncacaccgnnttnngnaacagnncaatnccaagttcngnaatgaggactacaccatacatgtgcagctgaatgactacntggacatcatctgnccgcactatgaanatcactctgtggcagacgctgccatggagcagtacatactg

SEQ ID NO: 1342 - DNA, 290 bp, Homo sapiens
  misc_feature (1)...(290): n = A,T,C or G
ncgcgtccggccggggggcgtgcgagtcggggccctgctgctgctggggtaacacggggctggtgtctgggacttntgctgnaacctgtctactggaactnggcgaataanaggttccaggcagagggtggttatgtgctgtaccctcagatcnnggaccggctagacctgctctgcccccgggcccggcctgctggccctcactcctctcctaattatgagttctacaagctgtacctggtagggggtgctcagggccggcactgtgaggcaccccctgccccaaacct

SEQ ID NO: 1343 - DNA, 635 bp, Homo sapiens
  misc_feature (1)...(635): n = A,T,C or G
cgtccgtgggcatcctgtgtatatcgtgcaggatgggcccccccagagccctccaaacatctactacaaggtatgagggctcctctcacgtggctatcctgaatccagcccttcttggggtgctcctccagtttaattcctggtttgagggacacctctaacatctcggccccctgtgcccccccagccccttcactcctcccggctgctgtcctcgtctccacttttaggattccttaggattcccactgccccacttcctgccctcccgtttggccatgggtgccccctttgncttanggnccctggatcctttttcnttgggggngggggaaaagggttaancnttttttttaacaaaaancaannnttttttnnnccctttnncncccccaanaannaggggggggaaannacccccttttgntgngggncccccnnttttttgtgnccnnnnnngggggnnnnnntttaaannannnnnnaaatttttcccccccnttttcccccccanaannngnggggggngtttttttnnaanaaaaaaaaaattttcccacnaaaaanttttttttcnnnncnnttggggggtntntnnantatgggnngcccccccnancncngggggggggggg

SEQ ID NO: 1344 - DNA, 308 bp, Homo sapiens
  misc_feature (1)...(308): n = A,T,C or G
gttccagaacctgacgacccggcgacggcgacgtctnttttgactaaaagacagtgtccagtgctccagcctaggggtgnanggggaccgccttccgcgccgtcaccatgcccaacttntctggcaactggaaaatcattcgatcggaaaacttcnaggaattgctcaaaagtgctgggggtgaatgtgatgctnaggaagattgntgtggctgcattgtncaanccagnagtggagatcaaacaggagggagacactttntacatgaaaacctncaccaccgtgcgcaccacaagagattaacttca

SEQ ID NO: 1345 - DNA, 448 bp, Homo sapiens
  misc_feature (1)...(448): n = A,T,C or G
gccccccgtccgataaagacacaaagtaccttcangaacacagagatcaactttcagctgggaatagagttcgacgaggtgacagcagatgaccggaaggtcaagtcnctggtgacgctggacggaggcaaactcatccatgtgcagaagtggaacgggcaggagacaacactaactagggagctagttgacgggaaactcatcctgactctcactcatggcagtgtggtgagcactcggacttatgagaaggaggcgtgacctggctgctccgtcactgaccgcccgctcctctgccaactggccacccctcagctcagcaccatgctgcctcatggttttcccctctgacattttgtataaacattcttgggttggggatttttctggagatacggggcatcagcctggacccagttcctactatgtatgtggttttattttttta

SEQ ID NO: 1346 - DNA, 1327 bp, Homo sapiens
  misc_feature (1)...(1327): n = A,T,C or G
tgctgggcttctccctcctatgccttcacacccctgtattactgtcttttattccttgacctcacatcctccgtctacttcctttttcagctttttctggctttcttgctgcttgcccttcccaaagcagacacggaggacaggtcaccatttagaagctccccgcctccccaagcactggacaaaggtcttaccccattccatccctcattcccaacacataggatggaagtatcaaatggccagatgccttcagatgtcagaaccgtggagtccgttgaaccctgtgtgtggggggctgtgtcttgggcctggttttgttgagcacatgagactttctcaagaataannacnnnnnnntnnnttttttttttctgccagtagcccctgtttaaactcttgaaccccagtcacagttttccagaagtccatcaggatagaattttcactaatcgccaaatgcccaaagcttagttctttcttagaaggaaaagaagaggtcaaatggacaggagagagcggagattggttgttctcaggggctccttccctttgcctgcttctttcatttgggacgccagaccttgacctggaagtgaggtcactattgggcagtggagtgtgagaaaggactttggcctgggggctgcaagttacagattaacacggggaggggtgaggagggacccagagggaggaaaggtggccagaggaagggacagctgacctggcacaatctgggcttgaagggggcacaacaagagcgtctttgagctggtgctgtctggagggatcttggctcctctccggctatctgaccttcctgaagacctgctcgcacactgcatcccttgcagtcagttccagatacagcatctctccctccagccagtgtctccaagccccggttggggacctccccctttctgcacacacacccaggtgctcctccttccccaggttaactatggtctggcattttcgtccgtccacgctcctgaggtcctcctcaaactccactcccacatcaaactgcacagtgtagtttcggaaggtgctgagcgtcctcaccgtcatgtggttgccctggtgttcgatctccttgtccggcttcagcagcagcgcgatcttccgcacagccaagctgatgtttagggcttgcaggtagtcctccatgttcttctgcgagacaaagcggtagtagccagtgaggttgggaggcattgtgtggatgaaggtttcaggagaatgcaggagacagggtgaggaaggagggggtgttgtctggcaggtgaggctgagagattccagccagcgcctaactata

SEQ ID NO: 1347 - DNA, 448 bp, Homo sapiens
  misc_feature (1)...(448): n = A,T,C or G
gcncgtngaancgtgggaccgnccnanatctatagacggcgttcatggagaaantgggcattaatgtgacnagagaggacctagcagctcatgacagtcgagangctganactcncacannatggatnnaaagttgacnntcaaagnancnagcaanttcagaaacactgatgttgtgattgagctcggctaaactttccctacagtctatcanacggaacggcgctcactggggcctgnaccattgagggaaataaacttattgggaaattnacacntgtagacnatggaaaggagctgattgctgtccgagaggttctggtaatgaactaatccagacctacacatatgaaggagttnangccnagcgattctttaagaangaatttgtnnacttnnnagagcctggagcnacgctnaaanagctaagcttgattgtcagattttc

SEQ ID NO: 1348 - DNA, 653 bp, Homo sapiens
  misc_feature (1)...(653): n = A,T,C or G
cgcgtcccgcatgtcagtcgtgaacgagggagctctattgccaccatgagtttctccggcaagtaccaactgcagagccaggaaaactttgaagccttcatgaaggcaatcggtgagtgctggactgaaaggcaaagctgtgggtcacatcagtcgagggtctagctctaccagcantggctatttagggtccaaatgttgagatggggggagagattcaggctatatacacaaactanggggcattttactgacttctggagttatttgcagcaagtcctcactgcacaaggccaccccataggcaagtggaaagagcactgaactagggtgtggtctggattgatggccatgtcattggcacttcgttgtgtgatcctattcctgcatttattcattcttcaaacaaacagtgattcaaggccaaccacacactgagcactgtgctggatagataccagggagacagatgataaaggcaataaggcattttcttatcagggaagagaagagaagaaataaaggtaataaggcattccctcaggtgtatggagcgctgactgtgccaggcgactgtgctgaccatgggatatgcaataccccatctattccttgccaaaaaactaagctgggtaccattattttcccacttt

SEQ ID NO: 1349 - DNA, 196 bp, Homo sapiens
  misc_feature (1)...(196): n = A,T,C or G
acctgattgctgtccgagaggtttctggtaatgaactaatccagacctacacatatgaaggagttgaggccaagcgattctttaagaaggaataagtcaacttctcagagcctggagcaacgctgaagagctaagctgatgtcagatttctttctccatcatgctaatgccaggctcattngtcatcctatcagca

SEQ ID NO: 1350 - DNA, 639 bp, Homo sapiens
aatcctttttaaagatccttttggcttctactccttcatatacataagtctggactagttcatcacctataatttctcggacagtattcagttcgtgtccattgtctgtcggtttgaattttccaataagtttatttccctcaaggctccaggtccccctgagttcagttccgtctgctaggttgaaattaaaggtgacaccaagttcaaaaacaacttcaatgtttcgaaaagcgcttgattctttgactgtgaatttatttccttcttgtgtaattgtcagcttcaaattgtcatgagctgcaagcttccttttcactatattaacactttaaaatatgcagctgatgtgagagtgtcacacagatgttaattgtttggcttgggtgtcttccatttctcatgctctacagtgtcttcactgatcagtggtggcttctcccctccatttctttgttcattgcagaaagcatctccaaagtaaaaaatgtgcagccttttatttgtctccattggttggaaatcaacatatacaaataaaaaagctttttttttttccctgtttttcaaaatgacaacattttaagttagatttatttaatcaggggctatgtccttctacttcatgtttctccggac

SEQ ID NO: 1351 - DNA, 344 bp, Homo sapiens
  misc_feature (1)...(344): n = A,T,C or G
cggaattnccgggtcgacccacgtgtccggntgtggaaaggaagcctcgttgccaccatgaacttctccggcaagtaccaattgcagagccaggagaactttgagccattcatgaaggcaataggtctgcccgaggacctcatccaganagggaaggacatcaagggggtgtcagaaatcgtgcatgnagggaagaaaatcaaactcaccatcacctatggacccaaagtggtccgcaatgagttcaccctgggggaggagtgcgaactggagaccatgactggggaaaaagtcaaggcagtcgtcaagctggaaggtgacaataaaatggtgacaacttttaa

SEQ ID NO: 1352 - DNA, 224 bp, Homo sapiens
  misc_feature (1)...(224): n = A,T,C or G
attnccgggtcgacccacgagtccggttgtngaaaggaagcctcgttngcaccatnaactnntncggnaagnaccanttncagagccaggagaactttnagccattcatgaagncaataggtctncccgnggncctaatncagnaagngaaggncatcaagggggtntcagaaatcgtncatncagggnngnaantcaaactcaccatcacctatggacccaaa

SEQ ID NO: 1353 - DNA, 265 bp, Homo sapiens
  misc_feature (1)...(265): n = A,T,C or G
tgaaaactttgagggctacatgaaggccctggatatngattttgcccccgcagnattgcagtnccgtttaantcaaacaaaggttatngatcaaaatggngatancttcangacaaaacccattagccacattccgnannatatgatgggggatttcactgttggagtaaagtttgacgagtccacaaanagcctgnataaccggnntgttaaggcactggtcacctggaaaggtgatgtccttgtgtgtgtccaaaagggggaa

SEQ ID NO: 1354 - DNA, 352 bp, Homo sapiens
  misc_feature (1)...(352): n = A,T,C or G
ggcacagagccacaaaccttcaccgaaccagnggccaccaccatgacagngggaccagaatggancctgggaaatggaaagtantgaaaactttgagggntacntgaaggccctggatattgattttgccacccgcagnattgcagtnctgtttcantcanccaaaggttatngatcaanatggggatannttcangacaaaacccattagcccattccgnacntatgatgnggatttcantgttggagtaaagtttgacgagtccccaaanagcctgnataaccggcttgttaaggcantggtcacctgggaaggtgatgtccttgtgtgtgccaaaaggggganaaggga

SEQ ID NO: 1355 - DNA, 485 bp, Homo sapiens
  misc_feature (1)...(485): n = A,T,C or G
tcncccgtccggtcctagtntgtgctgttcgtgtgtctcggtaacatttgccggtcacccattgcagaagcagtattcaggaaactggtaactgatgaaaaggtttcagataattggaggatagacagtgcggctacatccacctatgaagtggggaaccctcctgactatcgagggcagaactgcatgagaaaacatggcatccacatgcagcacattgcacggcagattacaaaagaagactttgccacattcgattatatactatgtatggatgaaagcaatctgagagatctcaatagaaaaagtaatcaagttaaaaactgcaaagctaaaattgagctacttgggagctatgatccacagaaacagctcatcattggaagatccctattatggcaatgactctgacttcgaggtggtgtaccagcaatgccttaggtgctgcaaggccttcctggagaagacttactagctggtcctaa

SEQ ID NO: 1356 - DNA, 208 bp, Homo sapiens
gcgtccggattgaggacgatgcatttgcgggcctgtcccacctgcagtacctcttcatcgaggacaatgagattggctccatctctaagaatgccctcagaggacttcgctcgcttacacacctaagcctggccaataaccatctggagaccctccccagattcctgttccgaggcctggacacccttactcacgttggatgcccacc

SEQ ID NO: 1357 - DNA, 902 bp, Homo sapiens
  misc_feature (1)...(902): n = A,T,C or G
caagggaaagtgtcccctgcgctgctcctgctctaaagacagcgccctgtgtgagggctccccggacctgcccgtcagcttctctccgaccctgctgtcactctcactcgtcaggacgggagtcacccagctgaaggccggcagcttcctgagaattccgtctctgcacctgctcctcttcacctccaaactccttctccgtgattgaggacgatgcatttgcgggcctgtcccacctgcagtacctcttcatcgaggacaatgagattggctccatctctaagaatgccctcagaggacttcgctcgcttacacacctaagcctggccaataaccatctggagaccctccccagattcctgttccgaggcctggacacccttactcacgtggacctccgcgggaacccgttccagtgtgactgccgcgtcctctggctcctgcagtggatgcccaccgtgaatgccagcgtggggaccggcgcctgtgcgggccccgcctccctgagccacatgcagctccaccacctcgaccccaagactttcaagtgcagagccataggtggggggctttcccgatggggtgggaggcgggagatctgggggaaaggctgccagggccaagaggctcgtctcactccctgccctgccatttcccggagtgggaagaccctgagcaagcagcactgccttcctgagccccagttttctcatctgtaaagtgggggtaataaacagtgatataggagtgccatggaaaaacaattatacaccttcacttncccaacacctttcgccaagcctcccacattacaaacttaaaaacccccaccccttttaacataaaaccaacaaacccaaaaaatcaaggggggaagggcccccntncccaaccaaattttt

SEQ ID NO: 1358 - DNA, 2363 bp, Homo sapiens
  misc_feature (1)...(2363): n = A,T,C or G
accccgcgtccggggcaggaacagcatttggggcccaggaagagggttgagtgctgtcagggtccttgtcaagccaagagggcaaatgcctgcctcctctggcatgcaggggagacacacccagggtcagggtggcacgctggggtctcctggatggcagaaggctctggtttgggactggagcattgctgtggtgtccccctcacctaccactgcccacatccccagctcattcgtcaggactggagtcacccagctgaaagccggcagcttcctgagaattccgtctctgcacctgctcctcttcacctccaactctttctccgtgattgaggacgatgcgtttgcgggcctgtcccaccttgcagtacctcttcatcgaggacaatgagattggctccatctctaagaatgccctcagaggacttcgctcgcttacacacctaagcctggccaataaccacctggaggccctccccagattcctgttccgaggcctggagacccttactcacgtgtgaggctcatgggggctgggaatgtggggaccggcgcctgtgcgggccccgccgccctgagccatatgcagctccgccacctcgaccccgagaccttcaagtgcagagccatagagctgtcctggttccagacggtgggggaagtcggccctgagcgtagagcccttctcctacgaaggcgagcctcacattgtgctggcacagcccttcgccggccgctgcctgatcctctcctgggactacagcctgcagcgctttcggcccgaggaagagctgcccgcgccctccgtggtgtcctgcaagccactggtgctgggcccgagcctcttcgtgctggccgcccgcctgtgggggggctcacagctgtgggcccggcccagtcccggcctgcgcctggccccaacgcagaccctggccccgcggcggctgctgcggcccaatgacgccgagctcctgtggctggaagggcagccctgcttcgtggtggccgacgcctccaaggcaggcagcaccacgctgctgtgccgcgacgggcccggcttttacccgcaccagagtctgcacgcctggcacagggatacggacgctgaggccctggaactggacggccggccccatctgctgctggccttcggcttcccagcggcccgtgctcttccactggaccggtggccgcttcgagagacgcacagacatccctgaggcccgaggatgtctatgccacacgccacttccaggctggtggggacgtgttcctgtgcctcacacgctacattggggactccatggtcatgcgctgggacggctccatgtttcgtctgctgcagcaacttccctcgcgcggtgcccacgtcttccagccactgctcatcgccagggaccagctggccatcctgggcagcgactttgccttcagtcaggtcctccgtcttgagcctgacaaggggctcctggagccactgcaggagctggggcccccggccctggtggccccccgtgccttcgcccacatcactatggccggcagacgcttcctctttgctgcttgctttaagggccccacacagatctaccagcatcacgagatcgacctcagtgcctgagaccaccaacaggactctgggcatggctggggcccctggacggccccttggctggctcctggccctacttggggtgatggtccgcctgtgagctgctgaccatgggccacgttcatcagccacacgtctaggccttaagcccacttcttaaaggatctgcacccatggggggacatagagggtcccagcctactggacctcccgagctgcccttcaggtctaaagcaacatctggacatctcggctggggcagattccccatcaaaggcaacctggggggtgcaggctggtgcactgcatggagtcgaggtggaggtcacgtgcagagctccatgaggtcccggagcccccctctcaacccgctcctaccccgctggtccctctgaaagcaccgaggggttgatggcattcctttcccattctaaactccacgcagccaatcgctttcctggaggagcgccaacctcgaagacaactcagcactgggcgggttcccctctgctgcttgtgcgcatgcgtgcggccgcccaacaagactagaactaaaagcctaaaacccttcccaccactcacacccatggaaacctggaaacatcaanaataaaattgccaacttctaaattnnnnnnnnnnnnnnnnnnnnnnnnnnnnnnnnnnnnnnnnnnnnnnnnnnnacactcaaaaaaaaaaaaaaaaaaaaaaaaaaaaaaaaaaaaaaaaaaaacctcgagggggggcccgg

SEQ ID NO: 1359 - DNA, 459 bp, Homo sapiens
  misc_feature (1)...(459): n = A,T,C or G
aacagcgccctgtgtgagggctccccggacctgcccgtcagcttctctccgaccctgctgtcactctcactcgtcaggacgggagtcacccagctgaaggccggcagcttcctgagaaatccgtctctgcacctgctcctcttcacctccaactccttctccgtgattgaggacgatgcatttgcgggccttgtcccacctgcaggtacctcttcatcngaggacaatgagattggctccatctctaagaatgccctcagaggacttcgctcgcttacacacctgtgcngtgcctccaccgccccagccctccatgangaggcacccatgctccaccccccagggaaacacaagggtatccttggtggcttgctggacggtggccttctctttccttccaaccaaggaaaggcctggggccnaattaaaccaattcttgggnaggaaccccttcccccc

SEQ ID NO: 1360 - DNA, 522 bp, Homo sapiens
cccatcccgcgtccgtgaacatctctagagccatccccggcggttgcagggacagtctgataagtgaactaagtttctatgcataaatgcttgcctctgggcctcctcgctgctgaccggtgtggttttggccgcaggtgggtggagccgctgactgccgagggcagagcctcgcttcggtgcccagcagcctcccgccccacgcccggatgctcaccctggatgccaaccctctcaagaccctgtggaatcactccctccagccttaccctctcctggagagcctcagcctgcacagctgccacctggagcgcatcagccgcggcgccttccaggagcaaggtcacctgcgcagcctggtcctgggggacaactgcctctcagagaactacgaagagacggcagccgccctccacgccctgccgggcctgcggaggctggacttgtcaggaaacgccctgacggaggacatggcagccctcatgctccagaacctcttctcgctgcggtcccgtgtccctg

SEQ ID NO: 1361 - DNA, 851 bp, Homo sapiens
  misc_feature (1)...(851): n = A,T,C or G
cactatagggagtcgacccacgcccccccagccccgcgttcggctgctctcgaggaggccggagtccccggagacgatgcgccccgcgcagccgcctgcgcctgcgggagccggctgcccttgagatggagttgctgcctctttggctctgcctgggttttcacttcctgaccgtgggctggaggaacagaagcggaacagccacagcagcctcccaaggagtctgcaagttggtgggtggagccgctgactgccgagggcagagcctcgcttcggtgcccagcagcctcccgccccacgcccggatgctcaccctggatgccaaccctctcaagaccctgtggaatcactccctccagccttaccctctcctggagagcctcagcctgcacagctgccacctggagcgcatcagccgcggcgccttccaggagcaaggtcacctgcgcagcctggtcctgggggacaactgcctctcagagaactacgaagagacggcagccgccctccacgccctgccgggcctgcggaggctggacttgtcaggaaacgccctgacggaggacatggcagccctcatgctccagaacctctcctcgctgcggtccgtgtccctggcggggaacaccatcatgcggctggacgactccgtctttcgagggcctggagcgtctccgggagctggatcttgcagaggaactacatcttcgagatcgagggcggcgcttttcgacggcctgggcttgagctgaggcacctcaacctgggcctttcaacaacctcccctgacattcgtgggatttngggattcacggcggcttgggtttccttcaacgttcanttaacaactt

SEQ ID NO: 1362 - DNA, 618 bp, Homo sapiens
  misc_feature (1)...(618): n = A,T,C or G
gacccacgcgtccggaccggcttgctctttgtgccgcccgccatcgaccggcgcgtggtggagctgcggctcaccgacaacttcatcgccgccgtgcgccgccgagacttcgccaacatgaccagcctggtgcaccttaattttttccggaacaacattgggcnagnggganntngngcctttnncnancnnggngnccttcnggncctnganctngannngaaccnnctnggngaaggnncccggnaacnacttccggggcnngggaaacntcngcnacnnnatcntngaaannancnaaatccgccggnggnngtngggggcnttnnacncnttcttgtcaacngggnagnacnngaattngtctnacaanancnngaaggccttgccttggaaggcggtggccaaaatggnaaaactnaaaaaccttaacgttgaacaanaacttattgaacaaattggggagngggaactttttgnganatttacanaaantnggncctttggaaatataacttcaaacggctgtgtanaaantcccgccgaaagggtnttttctgtgnggtcaangggacncnggnccaaaacgcccaccccggtgaccgtgaaattttgggg

SEQ ID NO: 1363 - DNA, 479 bp, Homo sapiens
  misc_feature (1)...(479): n = A,T,C or G
ttgccggcccgcctgctcgcctcctccggctgctccttgggtctgacgggcgagcgggcgcggaggagctctgtccggaatcacatagataccatcgtggaaacagcagcgcaggtcacggcgccgcgggccctgcaccagacgctgggctctagagattatttctctttattcagaagcatacagttgtttgctgattgcaagaagatgtttctgtggctgtttctgattttgtcagccctgatttcttcgacaaatgcagattctgacatatcggtggaaatttgcaatgtgtgttcctgcgtgtcagttgagaatgtgctctatgtcaactgtgagaaggtttcagtctacagaccaaatcagctgaaaccaccttggtctaatttttatcacctcaatttccaaaataattttttaaatattctgtatccaaatacattcttgaatttttcacatgcagnctccctgcatctggg

SEQ ID NO: 1364 - DNA, 4428 bp, Homo sapiens
  misc_feature (1)...(4428): n = A,T,C or G
cacgcgtccgggacaaacaaaaggaggcgccggagcagcgctccacccctccggcgggacggagcggccggggcctggggctgcctgccgggcggccgggcgcggcgagcccagggaggcagcgtccatggagcaaaaggaatgccaggatcctgcacaggcagacgcgggccagcctcagcaccgacagccgacgcgcagatagcagagccatccttggggttgaaccatgattccggtgacagagctccgctactttgcggacacgcagccagcataccggatcctgaagccgtggtgggatgtgttcacagactacatctctatcgtcatgctgatgattgccgtcttcggggggacgctgcaggtcacccaagacaagatgatctgcctgccttgtaagtgggtcaccaaggactcctgcaatgattcgttccggggctgggcagcccctggcccggagcccacctaccccaactccaccattctgccgacccctgacacgggccccacaggcatcaagtatgacctggacccgcaccagtacaactacgtggacgctgtgtgctatgagaaccgactgcactggtttgccaagtacttcccctacctggtgcttctgcacacgctcatcttcctggcctgcagcaacttctggttcaaattcccgcgcaccagctcgaagctggagcactttgtgtctatcctgctgaagtgcttcgactcgccctggaccacgagggccctgtcggagacagtggtggaggagagcgaccccaagccggccttcagcaagatgaatgggtccatggacaaaaagtcatcgaccgtcagtgaggacgtggaggccaccgtgcccatgctgcagcggaccaagtcacggatcgagcagggtatcgtggaccgctcagagacgggcgtgctggacaagaaggagggggagcaagccaaggcgctgtttgagaaggtgaagaagttccggacccatgtggaggagggggacattgtgtaccgcctctacatgcggcagaccatcatcaaggtgatcaagttcatcctcatcatctgctacaccgtctactacgtgcacaacatcaagttcgacgtggactgcaccgtggacattgagagcctgacgggctaccgcacctaccgctgtgcccaccccctggccacactcttcaagatcctggcgtccttctacatcagcctagtcatcttctacggcctcatctgcatgtatacactgtggtggatgctacggcgctccctcaagaagtactcgtttgagtcgatccgtgaggagagcagctacagcgacatccccgacgtcaagaacgacttcgccttcatgctgcacctcattgaccaatacgacccgctctactccaagcgcttcgccgtcttcctgtcggaggtgagtgagaacaagctgcggcagctgaacctcaacaacgagtggacgctggacaagctccggcagcggctcaccaagaacgcgcaggacaagctggagctgcacctgttcatgctcagtggcatccctgacactgtgtttgacctggtggagctggaggtcctcaagctggagctgatccccgacgtgaccatcccgcccagcattgcccagctcacgggcctcaaggagctgtggctctaccacacagcggccaagattgaagcgcccgcgctggccttcctgcgcgagaacctgcgggcgctgcacatcaagttcaccgacatcaaggagatcccgctgtggatctatagcctgaagacactggaggagctgcacctgacgggcaacctgagcgcggagaacaaccgctacatcgtcatcgacgggctgcgggagctcaaacgcctcaaggtgctgcggctcaagagcaacctaagcaagctgccacaggtggtcacagatgtgggcgtgcacctgcagaagctgtccatcaacaatgagggcaccaagctcatcgtcctcaacagcctcaagaagatggcgaacctgactgagctggagctgatccgctgtgacctggagcgcatcccccactccatcttcagcctccacaacctgcaggagattgacctcaaggacaacaacctcaagaccatcgaggagatcatcagcttccagcacctgcaccgcctcacctgccttaagctgtggtacaaccacatcgcctacatccccatccagatcggcaacctcaccaacctggagcgcctctacctgaaccgcaacaagatcgagaagatccccacccagctcttctactgccgcaagctgcgctacctggacctcagccacaacaacctgaccttcctccctgccgacatcggcctcctgcagaacctccagaacctagccatcacggccaaccggatcgagacgctccctccggagctcttccagtgccggaagctgcgggccctgcacctgggcaacaacgtgctgcagtcactgccctccagggtgggcgagctgaccaacctgacgcagatcgagctgcggggcaaccggctggagtgcctgcctgtggagctgggcgagtgcccactgctcaagcgcagcggcttggtggtggaggaggacctgttcaacacactgccacccgaggtgaaggagcggctgtggagggctgacaaggagcaggcctgagcgaggccggcccagcacagcaagcagcaggaccgctgcccagtcctcaggcccggaggggcaggcctagcttctcccagaactcccggacagccaggacagcctcgtggctgggcaggagcctggggccgcttgtgagtcaggccagagcgagaggacagtatctgtggggctggccccttttctccctctgagactcacgtcccccagggcaagtgcttgtggaggagagcaagtctcaagagcgcagtatttggataatcagggtctcctccctggaggccagctctgccccaggggctgagctgccaccagaggtcctgggaccctcactttagttcttggtatttatttttctccatctcccacctccttcatccagataacttatacattcccaagaaagttcagcccagatggaaggtgttcagggaaaggtgggctgccttttccccttgtccttatttagcgatgccgccgggcatttaacacccacctggacttcagcagagtggtccggggcgaaccagccatgggacggtcacccagcagtgccgggctgggctctgcggtgcggtccacgggagagcaggcctccagctggaaaggccaggcctggagcttgcctcttcagtatttgtggcagttttagttttttgtttttttttttttaatcaaaaaacaatttttttaaaaaaaaaaagctttgaaaatggatggtttgggtattaaaaagaaaaaaaaaacttaaaaaaaaaaagacactaacggccagtgagttggagtctcagggcagggtggcagtttcccttgagcaaagcagccagacgttgaactgtgtttcctttccctgggcgcagggtgcagggtgtcttccggatctggtgtgaccttggtccaggagttctatttgttcctggggagggaggtttttttgtttgttttttgggtttttttggtgtcttgttttctttctcctccatgtgtcttggcaggcactcatttctgtggctgtcggccagagggaatgttctggagctgccaaggagggaggagactcgggttggctaatccccggatgaacggtgctccattcgcacctcccctcctcgtgcctgccctgcctctccacgcacagtgttaaggagccaagaggagccacttcgcccagactttgtttccccaccgcctgcggcatgggtgtgtccagtgccaccgctggcctccgctgcttccatcagccttgtcgccacctggtccttcatgaagagcagacacttagaggctggtcgggaatggggaggtcgcccctgggagggcaggcgttggttccaagccggttcccgtccctggcgcctggagtgcacacagcccagtcggcacctggtggctggaagccaccctgctttagatcactcgggtccccaccttagaagggtccccgccttagatcaatcacgtggacactaaggcacgttttagagtctcttgtcttaatgattatgtccatccgtctgtccgtccatttgtgttttctgcgtcgtgtcattggatataatcctcagaaataatgcacactagcctctgacaaccatgaagcaaaaatccgttacatgtgggtctgaacttgtagactcggtcacagtatcaaataaaatctataacagaaaaaaaaaaaaaaannccnnccncccttcaannataaaagcttaccgctaaactantctaaannnnnnnnnnnnnnnnnnnnnnnnnnnnnnnnnnnn

SEQ ID NO: 1365 - DNA, 272 bp, Homo sapiens
  misc_feature (1)...(272): n = A,T,C or G
cctggggcttcaattttgcatctaggtatgcaatgttatccntgacnttgagaccggggctttccatgggctacggggtttgaggagattgcatctaaacaataataaactggnacttntgccgagatgatacctttctttgnctnggagaacctggagtacctacaggtcgattacaactacatcagcgtcattgaacccaatgcttttgggaaactgcatttgntgcaggngcttatcctnaatgacaatcttttgtccagtttacccaa

SEQ ID NO: 1366 - DNA, 394 bp, Homo sapiens
cacccgtccgatctgggacctcggaccctggctctgagggccacatccgcctccccccttcccaggagggcaacgccgggacacactgggtgcctgtctccggggtgccctgaccaacctgcccgctggtctgagtggcctggcccatctggcccacctggacctgagcttcaacagcctggagacactgccggcctgtgtcctgcagatgcgaggtctgggtgcgctcttgctgtctcacaactgcctctctgagctgcctgaggctctgggggccctccccgccctcaccttcctcacagtgacacacaaccgcctgcagacgctgcccccagcactgggggccctatccaccctgcagcgcctcgatctctctcagaatctgctggacacg

SEQ ID NO: 1367 - DNA, 733 bp, Homo sapiens
  misc_feature (1)...(733): n = A,T,C or G
gcgtctgctgcgtggaaccgccgagttcccagcgcttgagaagggtcttcctatgttgcccgggctggtcttgaactcctgaactcaagcagtccttcccgtggaaccgccgagttcccagcgcttgagaaggaaaattctggatctgttatctgtgaggaggccactccgttgacagttgtgtaaaactctgctgttttccccagctccaacctctctggtcttcaacaacactatcatcagggaaaacgtgggggaagatgaaccagccgtgcaactcgatggagccgagggtgatggacgatgacatgctcaagctggccgtcggggaccagggccccaggaggaggccgggcagctggccaagcaggagggcatcctcttcaaggatgtcctgtccctgcagctggactttcggaacatcctccgcatagacaacctctggcagtttgagaacttgaggaagctgcagctggacaataacatcattgagaagatcgagggcctggagaacctcgcacacctggtctggctgatctgtctttcaacaacattnagaccatcgaggggctgaaaacactgaaaaacctagactaactgagcttgttcaacaaccggatctccaagatcgactccctggacgccctcgtcaagctgcaggtgttgtcgctgggcaacaaccggatttgacaacatgnttgaacatcatcttancttccggcggttcaagtgg

SEQ ID NO: 1368 - DNA, 484 bp, Homo sapiens
  misc_feature (1)...(484): n = A,T,C or G
cctcaagnggttgcacacggtgcacctgtacaacaacgcgctggagcgcgtgcccagtggcctgcctcgccgngtgcgcaccctcatgatcctgcacaaccagatcacaggcattggccgcgaagactttgccaccacctacttcctggaggagctcaacctcagctacaaccgcatcaccagcccacaggtgcaccgcgacgccttccgcaagctgcgcctgctgcgctcgctggacctgtcgggcaaccggctgcacacgctgccacctgggctgcctcgaaatgtccatgtgctgaaggtcaagcgcaatgagctggctgccttggcacgaggggcgctggcgggcatggntcanctgcgtgagctgtaccttaccagcaaccgactgcgcanccgagccctgggcccccgtgcctgggtggacctngcccatctgcagctgctggacatcgccgggaatcagctnacagaagatcccgag

SEQ ID NO: 1369 - DNA, 491 bp, Homo sapiens
  misc_feature (1)...(491): n = A,T,C or G
gagaatttccttccagaattacccacgagaaattggaagttgtaacgaatgtaacacgtcatgtctctacgctccaacaaattagaatttcttcctgaagagattggacagatgcagaaactaagagtcctaaatttgagtgacaacagattgaagaatttaccattctcatttaccaaacttaaagagcttgcagctttgtggctttctgacaatcagtccaaagcccttatncctttacaaacagaagcccatccagaaacaaagcaaagagtattgactaactacatgtttccccagcagcctcgtggtgatgaanatttccagtcagacagtgacagctttaaccctacactgtgggaagagcagagacaacaacgcatgactgttgcctttgaatttgaagacaaaaaagangatgacnaaaatgctgngaaagttaaggttgaaataaacctaaaacgatatccaacttcttacccagaggattt

SEQ ID NO: 1370 - DNA, 413 bp, Homo sapiens
  misc_feature (1)...(413): n = A,T,C or G
gccccgcgtccggcctgnaggagctgctgctggacgccaaccagctccgcgagctgcccgagcnattnttccagctngncaaattacgaaagcttggactnagngataatgaaantcagcggctccctccagananagcaancttcatgcagctggtggaactagatgtgnctcgaaatgagattcctganattccagaaagcatttcattctgtnangcactgcaggtagctgacttcagnggaaacccactgactaggttgccaganagctttcctgaattacagaatgcaacatgtctttctgtggaatgacatctcactacagtctctacctgaaaatnttggcaatctttataacccggcttcactggaactgagagagaatcttcttacatatcttcctgactctct

SEQ ID NO: 1371 - DNA, 491 bp, Homo sapiens
  misc_feature (1)...(491): n = A,T,C or G
cgtccgaacagtgtnagagagtaaggtcacagaggacttgctgaaaatgaatgtatgtgcgttctctcttgccttggcattagtcggtagtgtcagtggccaatactacgattatgacatccctctcttcatgtatgggcaaatatcacccaactgtgcaccagaatgtaactgcccccacagctacccaactgccatgtactgtgatgacctcaagttgaagagtgtgccaatggttcctcctggcatcaagtacctttacctgaggaataaccaaatcgaccatattgatgagaaggcctttgagaacgtcacagaccttgcagtggctcattcttgaccacaaccttctagaaaactccaagatcaaaggaaaggttttctctaagctgaaacaactgaagaaactgcatataaactacaacaacctgaccgaggtccgtcggtccacttccaaagtccctgcaagacctacagctgaccaataataa

SEQ ID NO: 1372 - DNA, 3114 bp, Homo sapiens
  misc_feature (1)...(3114): n = A,T,C or G
gccacgcgtccggcgccgccggcggcggagggagcgtgactgcgctgcgcagggcgctaggaggcattgtcgccgctcaggcccttttgtgagaagcagaccagcctgggggctggcggcaggacacctgtgtctgcatgctgaagaagatgggtgaggccgtggccagagtagcaaggaaggtcaacgagacggtggagagcggctctgacactctggagctccacctggaggggaacttcctacaccgcctccccagcgagtccagtgccctgcagcacctcaaggccattgacctgtcccggaaccagttccaaggacttccctgagcagcttaccgccctgccggcgctggagaccatcaacctggaggagaacgagatcgtagatgtgcccgtggagaagctggccgccatgccagccttgcgcagcatcaacctccgcttcaacccactcaacgccgaggtgcgcgtgatcgccccgccgctcatcaagtttgacatgctcatgtctccggaaggcgcaagagcccccctaccttaggccaccctcctcatgcccacccagcaagggacagaggccacaggcctggaaccctggaagggagggaggcccatgggaggccaagcctgggggctgggggccgggtgggccgagcagcaccgtgggtgggtggggtgcagctggtctggatagatagcttacagcagtagtgggctctggaatgcccaagggaagaggcaaggtggggcctgcagcctggactcggcactcacagctgctgtgcaaactcaggcagatctcctgccctctctgagccttgtcacttgaaaaaaacaggaccctttccctcctttgggctccctggaggtttttaagcagtacgtgcctccaagttacctccagatcagcaggcacaggtgggcattgccaggtattttctgagcccctgcgggtttgaggccttgtttttagtgctgagagccagttgctgccctgagaagagaagacaacctccatctatttattgcttcctgagaactgacctggatgcggccctctgcagggcccagtcttcagtcctgtggtccctggactggtgggaacctgaactaggagtcctgggagagctgtggtgggaatatgggctggcactgctgcagggcaagaacattcatgtaggagcccgaggaccagcaggctgggaatggggagcaagtcacgtcagctctgtcattccccacagttaacaaattggcggggtgggaagtcctgagtgctccgtccctctagcatcactcctgagctgcgggagaggtggcccagagaacagcagagtcagttacacctgcagctcttgtctaaagtgattagatggccaccctcaccactgtccagtccagcagcagcctggctgccttgtcatggcctcctgggggcagaaggcgatgtggaccacgggatttgtagccagccagctcccaggccaacgcccaaagccctgatgacctggttcttctgaggccctcaacctggcatcttagggtatggtcaggcaacagggtgaccagctgtcctggtttcccaggacatggaactttcaatgctaaaactgggacagtacccagcaagtggggatggttggtcccctaccaggagagggcctggggctcttgcttcccgagaacgcctgtggcttgaagaaccttgactgcttggtcctcaggtatcttacctcccaccttctccttcatctgtggagcaagccaactcagtgccccagaccccacctgatctgcatctttgtttgcatctccagagacacctgaggccccagagcttgaggcaaagccaggccgtccaaatcctgtgtgccgtggacgagtggccactttactactcctaaggctaagatgttgagagctcagaccactgctcagagcagtaatccctgctcagaatgctcccagttccctcgtccctgcccaggtctcttgtctcttgggaaggaactgataggtcgggccattgttgggccatcactgagcgctcagtatctcaagagactctgttcattctgctcgtatcccaaggcctggttggtcaaactctgggcaaagggttttcaggatgaggaggtcaagacaggatgtccagagctaccgagttcatctgtgggtgttgggggcaagtgggggctgaagtcctgtgcaggctgcgctggccccacctgccttgtgccctggagtggggtttctccttgttgaagaagaggcatccttctctgatgtgcacaaacacaatgtatgaccagagccttgcaactcaaagtgtggtctgtggaccagcagcggcagtgacacctgggagcttgttaggaatgcagagtctaggcctcaccctatacctcccgactcagaccctgcattttagcaagacccccagctgattcctataagcactttagagtttgagaagcaaggacctaggctggggatgtcctccgagcagagggtgaagtttctctcagttctctccctgccacttccagggatctgagcctgtgttcagcctcctccctaacccaccctgggagacacttggcctgttagattgttccagagtctgcatggcactcctgaagaagggagtgtgacctgcagtcaccaggagatgagggttaggtgtgcccagccctccagacccggcctttctggttaacccctgcatgccaagctgcctgctgccccaggtcctcacctcaggcctttgaaggggcagcttctggaagttgttttctcctctgcttggagagtttgcccttgtctgtcttggaaagtgtgggcagccacagatgcccccaaatcagagctcacagtgagtgagcccctaagcttcagtctgcaataaagaatgcattggtttcaaaaaaaaaaaaaaaaaaaaaaaaaaaaaaaaaaaaaaaaaaaaaannnnnnnnnnnnnnnnnnnnnnnnnnnnnnnnnnnnnnnnnnnnnatnaatgccaattgttnntnnttaacttgttttattgcaccttataatnggtttccaattaaaaccattacctncccaatttcccnaaattaaacca

SEQ ID NO: 1373 - DNA, 419 bp, Homo sapiens
agagattcctgaaattccagaaagcatttcattctgtaaagcactgcaggtagctgacttcagcggaaacccactgactaggttgcagaaagctttcctgaattacagaatttaacatgtctttctgtaaatgacatctcactacagtctctacctgaaaatattggcaatctttataacctggcttcactggaactgagagagaatcttcttacatatcttcctgactctcttacccagctgcgaagactagaagaacttgatttaggaaacaatgaaatatataatttgccagaatcaattggagccctcttacatctaaaagatctctggttggatggaaatcaactgtcagaattacctcaggaaataggaaatctgaagaacctgctgtgtttagatgtctctgaaaacaggtt

SEQ ID NO: 1374 - DNA, 419 bp, Homo sapiens
cacgcgtccggccagccccgctcagtgagtctgtcctctggggctcgccatgcccccagcctccgcatggggaacaccatcagggccctcgtggccttcatccctgctgaccgttgccagaactatgtggtcagggacctccgtgagatgccgctggacaagatggtggatctgagtgggagccagttacgccgcttccccctgcacgtgtgctccttcagggagctggtcaagctctacctgagcgacaaccacctcaatagcctgcctccggagctggggcagctacagaacctgcagattctggccttggatttcaacaacttcaaggctctgccccaggtgggtgtgcaccttgaaacagctctgcatcctctacctgggcaacaacaaactctgcgacctccccagtgagctga

SEQ ID NO: 1375 - DNA, 510 bp, Homo sapiens
  misc_feature (1)...(510): n = A,T,C or G
accacgcgtccggcntgtccncagncagnangccantagtttattancttccannnacctggatttntgntaangtgnanactgtgcnntntacactnctnntgntactgcttgtgcctntgnnaaagccagnnccaccaaccnagctggncnnacncnttatntatgntnatggaacagnnantnnnnnagaatcnatattnggccaagattatgaggatanataccngnntggaaaaaatcttaaggaanatgaanctgtggtaatacccaatgagaaaagtcttcaattacaaanagatgaggcnanaacaccattacctgccangaaagaaantgatgaaatgcccacgtagtctgctgtgtgnntgtnnaatnggctctgnntactgngaagaagnngacattgatgctgtaccacccttaccaaaggaatcaggcctatctttacgcncgatncancanaantaaaangntgactgccnaagattttgcagacatacctaactt

SEQ ID NO: 1376 - DNA, 412 bp, Homo sapiens
  misc_feature (1)...(412): n = A,T,C or G
cgcgtgggctttggaagtgttaaacctcagcaacaatgccatccactccctctgngnggntctactcagtcctaagtcctcatgggtgaaacgccacagaagcagcttcagaaacaggtttccattgctgaaggtgctcattcttcaaagaaataaactcagtgacactcccaagggactgtggaaactgaagtcattgcagagtttggatctgtcattcaatgggatattgcaaatagggtggtctgattttcacaactgcctgcaactggagaatctctgtttaaagagcaacaagatattcaaaattcccccacaagccttcaaggacctcaaaaaattacaggtcatagaccttagcaacaatgctctgattaccatcctaccaatgatgatcatagctctagaattt

SEQ ID NO: 1377 - DNA, 817 bp, Homo sapiens
  misc_feature (1)...(817): n = A,T,C or G
ccgtccgggttcctactatacgcagaccacccagccgccggaccgcgcgcggcgctctggggaatccggcgccacgcgccgtgcggtggccaggatggaggaggccggagcagcggtggtcacggccggggaggccgaactgaactggtcccgcctcagcgtgtccaccgagacgctggagtctgagctggaggcgcggggggaggagcggcgcggggcgcgggaggcgctgctgcggctgctgctgcctcacaaccgtctggtgtcgctgccacgggcgctgggcagcggcttcccgcacctccagctgctggacgtgagcggcaacgcgttgaccgcgctcgggccggagctgctcgctctgcgcggcctgcgcacgctgctggccaagaacaaccggctcggcgggcccagtgcgctgcccaagggcctggcccagtcgccgctctgccgcagcctccaggtgctcaacctcagcggcaactgtttcaggaggtgcctgcctcgctcttagagctgcgcgcgctgcagaccctgacctgggcggcaaccaactgcagagcatcccggctgagatcgagaacttgcagagtttanagtgtttatatcttggaggaaatttcattaaagaaatcccaccagaattaggaaatctgccttctctgaattatttggtattatgtgacaacaaaatccaaagcatacctcctcaactttcacagttacattcaccttcgttccctaagtcttcacaataacttgctgacatatctgcctcgaggaggatcctcaaccttattcatttggaagagttgag

SEQ ID NO: 1378 - DNA, 507 bp, Homo sapiens
  misc_feature (1)...(507): n = A,T,C or G
gccccgcgtccgccccgcgtccgcttccagcgccgcttgcgctccggagcgctggctctgctggcgctgagaaatggaccaattttgacaagatatagtgctgcagcgtgcctgatgggatatattcagtcatggcgtccgaactttgtaagacgatctctgtggcaaggctagaaaagcacaagaatttgttcttaaattataggaatctgcaccattttccattggagttactgaaagatgagggactgcagtacttggagagactctatatgaaaaggaactccctgacatccttgccagaaaaccttgctcagaagcttccaaaccttgtggaactatacctgcactcaaataacataanttgtggttcccgaagccattgggtctcttgtaaaactccaatgtctggatccttagtgacaatgccttagaaattggtagcccagaaattggtcgtctgagagcttttaccgtcatcttcgattagctaataaccaactggaa

SEQ ID NO: 1379 - DNA, 330 bp, Homo sapiens
  misc_feature (1)...(330): n = A,T,C or G
tccggcttgcagcccctgccccgggcctgtcccctgcgctgctcctgcccccgagtcgacactgtggactgtgatggcttggaccttcgagtgttcccggacaacatcaccagagccgctcagcacctctccctgcagaacaaccagctccaggaactcccctacaatgagctgtcccgcctcagtggcctgcgaaccctcaacctccacaacaacctcatctcctccgaagaacaatctcatctccaaggtgccccgaggagccctgagccgccagactcaactccgtgagctctacctncagcacaaccagctgacagacagtggcct

SEQ ID NO: 1380 - DNA, 690 bp, Homo sapiens
agcggccgcagagccccggcgggcagccctgagctccccagctggttgtgctgcagcaacaaatagcgcagaccacgcgccccgtgcagccgagccgcctccacctgccggatgcggttgcggcccaggtgcaggatagccagggtccggggcaggccggcgggcactgtggtcagctggttgtgggagagatccaggtattcaaggctatgcagcttgctgaaggtggtggcatccaggccactgtctgtcagctggttgtgctggaggtagagctcacggagttgagtctggcggctcagggctcctcggggcaccttggagatgagattgttaactgcaggtggagccgctcgagtgagggcggcaggctgggcggcaggtagctgagctggttgttggagaggctgagggtggcgatggcctcggagccgcggaaggcgtcggggggcaggccagcgttgctcagcttgttgtgagccacgcagaggtgctgcagctgggtgagggactcgaaggcctcgtcaggcaggccttcggaggagatgaggttgttgtggaggttgagggttcgcaggccactgaggcgggacagctcattgtaggggagttcctggagctggttgttctgcagggagaggtgctgagcggctctggtgatggcttggaccttcgagtgttcccgcggac

SEQ ID NO: 1381 - DNA, 204 bp, Homo sapiens
  misc_feature (1)...(204): n = A,T,C or G
cccctacaatgagctgtcccgcctcagtggcctgcgaaccctcaacctccacaacaacctcatctcctccgaaggcctgcctgacgaggccttcgagtccctcacccagctgcagcacctctgcgnggctcacaacaagctctcagtggcccctcagttactgcccccgtccctccgngtcgcggatctggctgncaaccaagt

SEQ ID NO: 1382 - DNA, 541 bp, Homo sapiens
  misc_feature (1)...(541): n = A,T,C or G
gcggccgcagagccccggcgggcagccctgagctccccagctggttgtgctgcagcaacaaatagcgcagaccacgcgccccgtgcagccgagccgcctccacctgccggatgcggttgcggcccaggtgcaggatagccagggtccggggcaggccggcgggcactgtggtcagctggttgtgggagagatccaggtattcaaggctatgcagcttgctgaaggtggtggcatccaggccactgtctgtcagctggttgtgctggaggtagagctcacggagttgagtctggcggctcagggctcctcggggcaccttggagatgagattgttctgcaggtggagccgctcgagtgagggcggcaggctgggcggcaggtagctgagctggttgttggagaggctgagggtggcgatggcctcggagccgcggaaggcgtcggggggcaggccagcgttgctcagctggttgttgtggaggtacacggacctgagtgccggcttctccccanaggtgagggggaagatctccatcacttg

SEQ ID NO: 1383 - DNA, 911 bp, Homo sapiens
cgaccgcgttggctgggtggcctccattgccgggctgctgctctcagcggcggggctcgccagcgcttcagtgggcggggacgcggcaggtgactccagaccaaggaggatgagctgctgtccctggaagagaacggatggagggaagcagctcctacgaagttccctctgtggctgctgctgatctggaggagggtgctggtcagactaggagcttgcctgccaccccctccaaagatgttcacaagggtgttggaggcatcatcttttcctcctcaccgattttagacttgagtgaaagtggtctgtgccgtttggaggaggtctttagaatccccagccttcaacaattgcatctgcaaaggaatgccctgtgtgtgattcctcaagatttctttcagttgcttccgaacctgacttggctggacctccggtacaatagaattaaagcgcttccttctgggattggagctcaccagcatttgaaaactttgcttttagaaagaaatcctatcaaaatgttacctgtggagctggggagcgtaaccacgctgaaagcactgaacctaagacactgccctctggaattccctcctcagctcgttgtgcagaagggattggtggctatccagcgcttcctgcggatgtgggcagtagaacactctctccccagaaatccaacttctcaaggtttgtaggaggtgatttatgacaaatcacattaacgttgaagttacagctttttaaaatcagggcagaacctgtcttctctttaataacatcctgagaaatacaggagccatgggtcctctgaaaagttgacacagtgtacactgatctcaggccgaccccgtcatctctgtgacttttccttggttctataaatctgggcacattatagatcctgaaaa

SEQ ID NO: 1384 - DNA, 440 bp, Homo sapiens
  misc_feature (1)...(440): n = A,T,C or G
ccctgtgtgtgattcctcaagatttctttcagttgcttccgaacctgacttngctggacctccggtacaatagaattaaagcgcttccttctgggattggagctcaccagcatttgaaaactttgcttttagaaagaaatcctatcaaaatgttacctgtggagctngggagcgtaaccacgctgaaagcactgaacctaagacactgccctctggaattccctcctcagctcgttgtgcagaagggattggtggctatccagcgnttnctgcggatgtgggcagtagaacactctctccccagaaatncaacttcttcaagaggctncaccggttaggagagatgaccctccgtgaccttaccgagcccagggacttggagttgtttgggagaccacgcgtttaaccaaggagctttggaacggttagggacccagagg

SEQ ID NO: 1385 - DNA, 520 bp, Homo sapiens
gcaagctgcggacgttgcttctgggcgacaaccagctgagccagctctcgccccacgtgggtgccctcagagccctcagccgcctggagctcaaaggcaaccgcttagaggcgctgccagaagaacttggcaactgtggggggctcaagaaggcggggctcctggtggaagacacgctttaccagggtctgccggcagaagtgcgggacaagatggaggaggaatgaagctggggtggggccgttttaggtagagccttaaaaatgcttctgccctggaatctcaaccattgtcttccaagataggaagccaagtgggtccaggccaggagatggggggggcgggggcagctgtgtcatctttctggggcccagaaggatctgggctggtttgtctggggagacagacaggatgttgtggagctggggtggaacctggtatggagggattaactcagtcatggcattctccgaccaaaaccacacctgtgtctctggcaggctggctggccttgctccca

SEQ ID NO: 1386 - DNA, 1102 bp, Homo sapiens
  misc_feature (1)...(1102): n = A,T,C or G
tactagtctaccggcccgcccttttttttttttttttattttttaaaatagattttattgtatatatttaaactatacaacataatgttatagggcacatagagatcataagatgcttactagaatgtagcaaattattttaagatttacatattgcttttataattataaagctattttttttattttaaaagtagctaagtttgcaacatttcaaaaactttttccacatcttctgtctacttttctgtaggcatcccagtgaaacatgtacaattcaaatgaccacatgctggacagccaggcgcatccccatgcaggccacgtgggcctcttagaagcagcctcctgggactgtgtagcctcctgcagccatacaatcccgtcctggtcgcccgtctcagcctcggtcctgagcagccttctcatcaccatcagattgggatgtcccacggcccaggggctccatctcccccttggtctatttccagaacaggccctagccagggagaatgtcgaaaccccggtgagtgtcaatgagcctcgctgagaccacagtttangaggaaacttctggagcccatagctcctgggcgcctcctatggttccgtctatggctccttctaaggatcttcgagtcctctctggcctgctacttccctccacctccagttctgtcagctttaccctcagccaccatcctgggcactgctaggtaagccgtcaggggatccaggtcccccggtatggcggacagcccaagctcaagagcagtcggcagacagcatgatgccgtcctcctggcagtggcagggggccgggcaggcggtaggccccgggccgggctggggggcgcagccggcgctcggggaggcgcacacagcggcgcgaagtcacagcgcccggagcctgggcgggttgggcatctcggcggccgggctgctgggtcacctggcggccaggcgcgcagacgcacgggcgcggtgtccgcagctgctttctcccggtcccggcgggctgcgccgtcggtggggaccgccccgggggctctactgggcgtcggcggcggggcggtgcagtcagagagcggacgcggggtga

SEQ ID NO: 1387 - DNA, 471 bp, Homo sapiens
  misc_feature (1)...(471): n = A,T,C or G
actgatactccaaggaaatcggatccgatctattactaaaaaagccttcactggtttggatgcattggagcatctagacctgagtgacaacgcaatcatgtctttacaaggcaatgcattttcacaaatgaagaaactgcaacaattgcatttaaatacatcaagccttttgtgcgattgccagctaaaatggctcccacagtgggtggcggaaaacaactttcagagctttgtaaatgccagttgtgcccatcctcagctgctaaaaggaagaagcatttttgctgttagcccanatggctttgtgtgtgatgattttcccaaaccccagatcacggttcagccagaaacacagtcggcaataaaaggttccaatttgagtttcatctgctcagctgccagcagcagtgattccccaatgacttttgcttggaaaaaagacaatgaactactgcatgatgctgaaatgga

SEQ ID NO: 1388 - DNA, 550 bp, Homo sapiens
  misc_feature (1)...(550): n = A,T,C or G
nagatgaactctacttctgcaagaaacttaaaactctgaagattggaaaaaacagcctatctgtactttcaccgaaaattggaaatttgctatngntttnctacttagatgtaaaaggtaatcactttgaaatcctccctcctgaactgggtgactgtcgggctctgaagcgagctggtttaagttgtagaagatgctctgtttgaaactctgccttctgaccgtccgggagcaaatgaaaacagaataacttatttttcgttaaagtttgactgaaacacgcttctaccaaatacagtntaaataattaggtagtcttaatgcctttcctatttttttttccttttcacacaaaatggacacaaagantcgcgtaaggnggatgtatttttaataaaaatttaattgnattttttcaatattgngnaaangnananngnnnccnncngggggggnnngnnccntttcanannnanangggggggggctgtngccncttttngngaaangccntttaaaannnnngnnnnncaaaaaaaaaaaaaaaaaa

SEQ ID NO: 1389 - DNA, 334 bp, Homo sapiens
  misc_feature (1)...(334): n = A,T,C or G
gtccgcggacgcgtgggnttttttttttttnttgcttactccatgagagggcatttgggngtngagccagaaggccntcgcagggggggacggtgtgtncgtntaagangngcccnncnnncannnncntcgnanncntanaggnntaccaccnnctttattggagctntncttanattataataaaantgcaacagtggaacttgaggattttaaaccgatncaaagaactacaaaggctgggcctaggaaacagcanaatcacanatatngaaantgggagtcttgctaanataccaccgtgngagagaaatacatttggnaaacaatanac

SEQ ID NO: 1390 - DNA, 860 bp, Homo sapiens
  misc_feature (1)...(860): n = A,T,C or G
cgacccacgcgtccgcccacgcgtccggtgagctgagcctgctccagaacctcaggaccctgtggatcgaggccaactgcctcacccagctgccggatgtggtctgtgagctgagtctccttaagactctgcatgccggctccaacgccctgcgtttgctgccaggccagctccggcgcctccaggagctgaggaccatctggctctcgggcaaccggctaactgactttcccactgtgctgcttcacatgcccttcctggaggtgattgatgtggactggaacagcatccgttacttccccagcctggcgcacctgtcaagtctgaagctggtcatctatgaccacaatccttgcaggaacgcacccaaggtggccaaaggtgtgcgccgtgtggggagatgggcagaggagacgccagacccgcgtccgagaaaagccaggcgctatgcgttggtcagagaggaaagccaggagctacaggcaccagtccctctacttcctcctaccaactcctgaggagcttcagttgcaagtcaatgccaaggacccaactgcagcatgttctggaagcctctccattggagtggaaaggatggctctgggtcatttgggagtggctctgctagtanagactgatggagagagccaggtggaatgccataaatcacactgagaaaatatttctggcaaacagctcctcttccagaggggagttgtgtgccaatgatggcatgacaatccagagatcataacttctttgcaagaaaacagcttctccacacatgtattttgaaacactgaagagcaaaaggggctgggacactctgaactcctgcactctccagaagtgactggtca

SEQ ID NO: 1391 - DNA, 630 bp, Homo sapiens
  misc_feature (1)...(630): n = A,T,C or G
tccgaaaaaaccaatctacatcttccagcagaaatcggttgtttgaagaacctgaaagaactcaatgtgggtttcaactatctgaagagcattcctccagaattgggagattgtgaaaatctagagagactggattgttctggaaatctagaattaatggagctgccctttgaattaagtaatttgaagcaagttacatttgtagatatctcagcaaacaagttttccagtgtcccaatctgtgtcctgcggatgtcgaatttgcagtggttggatatcatgcagcaataacctgaccgacctgccgcaagatatagacaggctanaggagctgcagagctttctcttgtataaaaacaagtttgacctaccttccctattccatgctgaacctgaagaancttcactctnttagtccgtcantggggaccattttggtggagctccccaaacctgcccttttgtgactcatccacacacccaaaatttgtaagccttatggacaatcctattgataatgcccaatgtgaagatggcaatgaaataatggaaagtgaacggggatcgccaacattttgataaagaagttatgaaagcctatattgaagaccttaaagaaagagaatctgt

SEQ ID NO: 1392 - DNA, 2122 bp, Homo sapiens
  misc_feature (1)...(2122): n = A,T,C or G
attacatttcacttggttacagctgactggggattttaatcatttggagccacactgaaaaaaaaatttccccctgcaatctactcttaactgatagtcgctaactttggttatgtgtgtctattcagaatattacattaattgatttctcaaacaaaggtcctttctgaaatggtatctatgattcagctattcaaaacctaatgaagttggtgactatgacaatgtggagaaatcatgacagaaaatgtggtttgtactggggctgtcaatgctgtaaaggaagtttgggaaaaaagaataaagaaactcaatgaagacctgaagcgagagaaggaatttcaacacaagctagtgcggatctgggaagaacgagtaagcttaaccaagctaagagaaaaggtcaccagggaagatggaagagtcattttgaagatagaaaaagaggaatggaagaccctcccttcttctctgctgaaactgaatcaactacaggaatggcaacttcatagaactggtttgctgaaaattcctgaattcattggaagattccagaacctcattgtgttagatttatctcgaaacacaatttcagagataccaccagggattggactgcttactagacttcaggaactgattctcagctacaacaaaatcaagactgtccccaaggaactaagtaattgtgccagcttggagaaactagaactggctgttaacagagatatatgtgatcttccacaagagctcagcaatctgctaaaacttactcaccttgatctgagtatgaacgattttactacaatccctcttgctgtgttgaacatgcctgcccttgagtggctggacatgggaagcaacaaacttgaacaacttcctgatactatagaaagaatgcaaaatctacatacgttatggctgcaacgaaatgaaataacatgcttgcctcaaacaatcagcaatatgaaaaatctgggtactcttgttctcagcaacaataaactgcaagatattccagtatgcatggaagaaatggcaaatctgaggtttgtcaacttcagagacaacccactgaaattgaaagtatcacttcctcccagtgaaggcacagatgaagaagaggaacgggaattatttggccttcagtttatgcacacatacatacaagagtcacggagaagagcagatcaccaagtcaacggttcaactactttaccaatctccataaatacggatggataatataattcaagatgcccttctaaagaggattactttggtgaattctctaatgtttggatttctgaagtaaaaagaaaagctattaccaaagtttaatgaggccacagcattttttaaagttcatattatttgctatttaaagtatatatttttttgatataaaaatataattaaaaaattttttttggtggaagacagatgatgctcaaatttcttttccattaagcagttgtttctggtgatgaagaatgatttggtaaagcagttaacaaaacattttccaaagacaccagagggtctgtatagtactgcaaagcaggactgaatcccttctgctgcaaatactggattcgaccttggtcaatcagcaatttacaaagatgccctattttcttcttttcttcaacactaagaagcctaaattgaataaacacacacaaaacattgttaaaattttgcaaaagtttataaaaaattatttttgtcactatttattgagagactgttaactaacccataatgtactaagtactttgtcccatgcttccaagacacattatatttatgaccacaataaaagatgtgtatattttaagcttattctaaaattagattataaaatacattttcatgaattgntgataatagtcatntaaagtacagnacaatataatatttctnctttagtatcatgcattacaaaagtagtctcttacccaggcaaacaatcagcgccatcatctgtgattctgtatcctccatcatcatgctcttcactatcatcattctgattatcttgcctctttgtggttctatttgaggtttccaaagatgttttccgcatcccacaagttgcccaactactcattcgctggaa

SEQ ID NO: 1393 - DNA, 518 bp, Homo sapiens
  misc_feature (1)...(518): n = A,T,C or G
ggcccccgaactaacggaagctaccttgtataaagacctcaacactgctgaccatgatcagcgcagcctggagcatattcctcatcgggactaaaattgggctgttccttcaagtaacacctctatcaagttatggctaaaatcctgtccaatctntgtgtcgctgccaatcgccttaaaattaatataactataaaattatcacatccatcccaaaataaataccaaaccatgcaaaaacccacaaccatcataacaaacaaataaacaattcaagaaacaccccaaataaaaaaaactccctgaaaatacaaataataaacctaaaaaacaacagcctaaaaaaatatcaaaacaaacaacaaaaataaccaaaaaancaacattaacaaaaaaaataacacaaacnaaaaccacttaccaaaaactatcaanaaaaaagaagtttncaattttgccaaggaaaaataaaacnattaaggggnctnattcnantttaatnnatttcaacttttcaa

SEQ ID NO: 1394 - DNA, 262 bp, Homo sapiens
gtcgccacgcgtccgggccgctgcagccctggcagcgggcacacccctaagcatacgcacccaacgcctcctccctgagccacgaggatggagcagccaccccggcccgggactggcgcaaggtgcccaagcaaggaaagaaataatgaagagacacatgtgttagctgcagccttttgaaacacgcaagaaggaaatcaatagtgtggacagggctggaacctttaccacgcttgttggagtagatgaggaatgggctcgt

SEQ ID NO: 1395 - DNA, 540 bp, Homo sapiens
tcccgaggatgggtttcaatgtaattaggctctgagcggatcagctgtagcactggttatagcccccactgtcttactgacaatgctttcttctgccgaacgaggatgccctaagggctgtaggtgtgaaggcaaaatggtatattgtgaatctcagaaattacaggagataccctcaagtatatctgctggttgcttaggtttgtcccttcgctataacagccttcaaaaacttaagtataatcaatttaaagggctcaaccagctcacctggctataccttgaccataaccatatcagcaatattgacgaaaatgcttttaatggaatacgcagactcaaagagctgattcttagttccaatagaatctcctattttcttaacaataccttcagacctgtgacaaatttacggaacttttggacctgggatatacccggtcccgaagtttagccaggaatggctttgctggcatgatcagactcaaagaacttcacctggagcacaatcaatttttcaagctcaacctggcccttttt

SEQ ID NO: 1396 - DNA, 813 bp, Homo sapiens
  misc_feature (1)...(813): n = A,T,C or G
ccctaagggctgtaggtgtgaaggcaaaatggtatattgtgaatctcagaaattacaggggataccctcaagtatatctgctggttgcttaggtttgtcccttcgctataacaagccttcaaaaacttaagtataatcaatttaaagggctcaaccagctcacctggctataccttgaccataaccatatcagcaatattgacgaaaatgcttttaatggaatacgcagactcaaagagctgattcttagttccaatagaatctcctattttcttaacaataccttcagacctgtgacaaatttacggaacttggatctgtcctataatcagctgcattctctgggatctgaacagtttcggggcttgcggaanctgctgagtttacatttaccggtctaactccctgagaaccatccctgtgcgaatattccaaagactgccgcaacctggaacttttggacctgggatataaccggatccgaagtttagccaggaatgtctttgctggcatgatcagactcaaagaacttcacctgggagcacaatcaattttccaagctcaacctgggccctttttccaaggttggtcagccttcagaacctttacttgcagtgggaataaaattcagtgttcatagggacagaccatgtcctggggacctggggagctccttnacaaagggtttgattttatccagggcaattgaggntccgaagnttttcagtggggaccccagttgttttttcccagttgttgttccccganttttgncagcggnttcaacncgggggttttccaacaagtntcaca

SEQ ID NO: 1397 - DNA, 554 bp, Homo sapiens
  misc_feature (1)...(554): n = A,T,C or G
cgccncgcgtccggacaatgcccataatcgactggaattgcctcttatcatgctctctggccttccagacactgtttttgaaatcacagagttgcaatctctaaaacttgaaatcattaagaacgtaatgataccagccaccattgcacagctagacaatcttcaagagctctctctgcaccagtgttctgtcaaaatccacagtgcggcgctctctttcctgaaggaaaacctcaaggtcttgagccgtcaagtttgatgacatgangggaactcccccctgggatgtttgggctccnaaattttggaanagctttacccaagtngggtttttaaagcatgaattttcccaaaaaagggnncccttgngtttnttgggggatntnaaaaccctnaaaaatttttttttaaaaaanannagttttnnaaaaanncctannngggggggggggtttttccccccccncccccnaaaaaggggttnnnttttttttgggnccccccccnggngggnncaaaccccaaaaaaaaaaanannnnncccccnnnngggg

SEQ ID NO: 1398 - DNA, 580 bp, Homo sapiens
  misc_feature (1)...(580): n = A,T,C or G
tcatgaccttggctctcaaccgcatcagccacatccccgactacgcgttccagaatctcaccagccttgtggtgctgcatttgcataacaaccgcatccagcatctggggacccacagcttcgaggggctgcacaatctggagacactagacctgaattataacaagctgcaggagttccctgtggccatccggaccctgggcagactgcaggaactggggttccataacaacaacatcaaggccatcccagaaaaggccttcatggggaaccctctgctacagacgatacacttttatgataacccaatccagtttgtgggaagatcggcattccagtacctgcctaaactccacacactatctctgaatggtgccatggacatccaggagtttccagatctcaaaggcaccaccagcctggagatcctgaccctgacccgcgcaggcatcccggctgctcccatcggggatgtgccaacagctgcccaggctccgagtctggaactgtctcacaatcaaattgaggagctgccagcctgcacaggtgtcaaaaattggaggaaatgtgccaagggaan

SEQ ID NO: 1399 - DNA, 382 bp, Homo sapiens
  misc_feature (1)...(382): n = A,T,C or G
tatggcaccattcagagatagcgtatgcagtttagacaggtactggaatgctgaccttcccacaaactggattgggttgtcataaaaatgtattgtctgcaggagagggttgcccatgaaggctttctcctgggatagccttgaatgttgttgttatggaaacccaattcctgcagcctgcccagggtccggatagccaaggggaactcctgcagctcattatagttcaggtctagtgtctccagattgtgcagcccctcnaagctgtgggtccccacatgctggatncggttgttatgtanatgcagcaccacaagactggtnaggttctgnaaggcatanccagggatgtggcgnatatggttganagccaaggtcatgn

SEQ ID NO: 1400 - DNA, 1016 bp, Homo sapiens
  misc_feature (1)...(1016): n = A,T,C or G
agcnnnnnnnnnnnnnntttttttttttttccttaatttgggggaggatatattccaacttgggggaagggtgaaggcattttagctctgaagctcaatcatgacatttctagagagttctgcagtgcccccgcattggacaggacaggatggaagagtgtgctggactggctggattccccagtgtcaagctggcagcgctcctgaggttcttgagtgtttatcaactcagcaggtcaaaagtctgcagacactgggtggagcagcagtaagccacaaaactaacagttgtcttccactggtgcagccctgccattggcgtctctctcaagggaaagagcttggggtagacgatggtaaacataggctcactacaccgatgacagtgccccagagggcagtgcagcagctctaggagacttctgggtaatgagattggagacagaaagttcaaatctttcagcaagctgtggtaggtatgatacagccctctcatagccaattcctgcagagggaggacgtgatcatgctccgtccctatggccttcacctcagctgggaggaaaacggttcgctgccctgatgaaaaggaaagcagcttcacctcggaaacttgaatgggagcaccacagccactgcacccgatgactttattgtacagataagatggcaagcctttcaggtgaatgttgttatccacgtatacatactgtagttctcgagatcgacctaaatcaagtggcaaaaatgcaagacggtttccagccatggagagctcattgaggctgggcagctggcagagatggcgcggcacataccatagacgatttcggtccacagtgaggtactgcagagaaaggcacatgtgaagcctctcgggtaaagttagcaaacgattggtagaaatgtctagtgtctgcagctccttcaaatcgccaacctctggaggtaggaattgcagttggttattagctaatcgaagatgacgtaaagctctcagacgaccaatttctggg

SEQ ID NO: 1401 - DNA, 1241 bp, Homo sapiens
taaagacccgcccacgcgtccgccgatggcggcgccgggtggcgggaaggaggaagtttcaaagccagcttgacctggttgtggccgttgggcgagatgaagctacactgtgaggtggaggtgatcagccggcacttgcccgccttggggcttaggaaccggggcaagggcgtccgagccgtgttgagcctctgtcagcagacttccaggagtcagccgccggtccgagccttcctgctcatctccaccctgaaggacaagcgcgggacccgctatgagctaagggagaacattgagcaattcttcaccaaatttgtagatgaggggaaagccactgttcggttaaaggagcctcctgtggatatctgtctaagtaaggccatttccagcagtttaaaaggtttcctttcagctatgagactggctcatagaggctgtaatgttgatacaccagtttcaacgctcacaccagtgaagacttcagaatttgaaaactttaaaactaaaatggttatcacatccaaaaaagactatcctctaagtaagaattttccatattccttggaacatcttcagacttcttactgtgggcttgtccgagttgatatgcgtatgctttgcttaaaaagccttaggaaattagacttgagtcacaaccatataaaaaagcttccagctacaattggagacctcatacaccttcaagaacttaacctgaatgacaatcacttggagtcatttagtgtagccttgtgtcattctacactccagaagtcacttcggagtttggacctcagcaagaacaaaatcaaggcactccctgtgcagttttgccagctccaggaacttaagaatttaaaacttgaccgataatgaattgattcaatttccttgcaagataggacaactaataaaccttcgctttttgtcagcagctcgaaataagcttccatttttgcctagtgaatttagaaatttatcccttgaatacttggatctttttggaaatacttttgaacaaccaaaagtccttccagtaataaagctgcaagcaccattaactttattggaatcttctgcacgaaccatattacataataggtaagattttaatagtcatgtaatgtggtgtctttgatagcattctaatattcctatcaaactcagagtaataaagtctaacattgcttacagtgctatgcacagtctgaccctttgctataatggtcttcttgttcctt

SEQ ID NO: 1402 - DNA, 1323 bp, Homo sapiens
  misc_feature (1)...(1323): n = A,T,C or G
gccccgcgtccggtaaccctgagcaggttgcctgggagatgacctctttcgggtctctttgaatctccgctgtagcgtcacctggaaggcagatctaacagagaacctggactgtctcctatcatgattcccgggaaatatcgctctgtttctggccgggctgcgaacaacgtgaactgcgggcttcatctggttattcaaacatcatcgcttcctgaaaaaaacaaagttgaattcaagctaaataaagacacatcgtcattccccggtagacttttacaacatgaccttgaaagaaactactcaagtaggcaaggtgatcatattaatttggtgagctcatcattgtcatcatttcctattcttcaacgttcttctgaagagaaaattctttactcagacaggttgagcctagaaagacaaaagctgaccgtatgtcctatcatcaatggggaagaccaccttcgtttgttgaactttcaacacaattttataactcggatacaaaatatttctaatctacagaagttaatatcgttggatttatatgataaccagattgaagaaattagtgggctttcgactctgagatgtcttcgtgtccttctgttggggaaaaacagaatcaagaaaatctcaaatctggagaatctaaaaagcttagatgtcttggatcttcatggaaatcagattaccaaaattgaaaatattaatcatttgtgtgagttgagagttttaaatcttgccaggaactttttaagtcatgttgataatcttaatgggctggattcactaactgaacttaacttgcgacacaatcaaatcactttcgtgagagatgtggataatttgccctgcctccaacatctctttctcagctttaacaatatatctagttttgacagtgtttcctgccttgctgactcttcttccctctcggacatcacctttgatggcaatcccatagctcaagagtcatggtacaaacacactgtccttcagaatatgatgcagctgcgccanctaagatatgaagagaatcacggaagaagaaaggcgtatggcatctgttttagccaaaaaagaggaagagaagaagcgggaaagtcataaacaatctttgcttaaggagaagaaaaggttaacaattaacaacgtagctcgacagtgggacttgcaacaacgagtagccaatattgctacaaatgaagatagaaaagatttctggactctcctcaggaccctgttcagattgatgggaaggcaccctctttggctttcccagaggcccacaggggcntttaggattcagggnttcaaggn

SEQ ID NO: 1403 - DNA, 2053 bp, Homo sapiens
  misc_feature (1)...(2053): n = A,T,C or G
ccacgcgtccgaatttgccctgcctccaacatctctttctcagctttaacaatatatctagttttgacagtgtttcctgccttgctgactcttcttccctctcggacatcacctttgatggcaatcccatagctcaagagtcatggtacaaacacactgtccttcagaatatgatgcagctgcgccagctagatatcaacacaaccacggtctgctggagtttgctgggggtccactccacaccctgtttgcctgggtgtcaccagcagatgctgcagaacagcaaaacattgctgcctgctctttcctctggaagcttcatcccagaggggcacccgccagatgccagttggagctctcctgtatgaagtgtctgtcaacacctgctgggaggaagaagaaaggcgtatggcatctgttttagccaaaaaagaggaagagaagaagcgggaaagtcataaacaatctttgcttaaggagaagaaaaggttaacaattaacaacgtagctcgacagtgggacttgcaacaacaacgagtagccaatattgctacaaatgaagatagaaaagattctgactctcctcaggacccctgtcagattgatggaagcaccctctctgcattcccagaggaaacagggcctctagactcaggactcaacaatgctttacaaggtttatctgtcatagacacataccttgttgaagtggacggggatacactttccctatatggctcaggagcactggaatctctggataggaattggagtgttcaaacagcaggaatgatcacaacagtctccttcactttcatagaatttgatgaaatcgtccaagtgcttcctaaactgaagattaagtttcctaattctctgcaccttaaattcaaggaaacaaatcttgtaatgctcagcaatttaacgcactagcccaactccgtcgctattgaccagttgacaattgatcctcaaggaaatccagttgtcaattttacactctggaaatactatgtactgtttaggctaagccatttcagtatgcagaaaataaatggaacagaggtgacacagaatgatatgataatggctgaaaggctctttggaatcctagcacatgtagcatcttctgagttaccccagtatcgtcctgatttccattctgggtgatgccagggaaaaagcaatttcggtatctactagaatcccaaaggaaaaaaacccggtattatcaacgaagaaaataatgacagcaaaagacttgtaggagaaaacacaaatcgtgctacattaaattatactacaagagacttttataatgaaaagctagaggaaataaaggaaaagaagaaattctgtaaaacatatatagaagaccttgtgaaggaagccacagaaatcaacatgaaaaatgaggctttgcagaagctttggccacagatgttcattgagcttgttagggatgcagtcatagaaattcgcaataaaaattcctatatgaagctctgcctacagcagataacagaccaaaaataaaaatggcctttagttacagttaaaaaaaacagattttattttttgaaggttgaaaatatgcaggttatacatgttaaaacaacaacaacactatcctataaactagaaagactagtataaaagcattattgcccactgttctcatagctaaaagttaagaaggaaagaaggaaagcaggagaaaggaaggattaattgcctgtatgtgaggaccaaacaacctttgggaactaaacagttttcagagatggcgtggcactgcatccttggttcttgctttgattggtgccctgctatagcccaaagcacgtagtatttgctgatgattcagcatgagctgcatctacctacttttagctgataattttcagttatttccctttttattttatgtcatgatttcaaagccaaaaatatgttctttttatgagtgaagaataaacttactaacaaattagtcaaaaaaaaaaaaaaaaaaaaacnnnnnnnnnnnnnnnnnnnnnnnnnnnnnnnnnnn

SEQ ID NO: 1404 - DNA, 348 bp, Homo sapiens
ccaagaagaagaataacacaaaataccctccgcttgaattgccgtctttctacatgactccatctcatcgccaagttgtgtttgaaggagacagccttcctttccagttgcatggcttcaaatattgatcaggacatgcaagtgttgtggtatcaggatgggagaatagttgaaaccgatgaatcgcaaggtatttttgttgaaaagaacatgattcacaactgctccttgattgcaagtgccctaaccaatttctaatatttcaggctgggatctactgggaaattggggggctgttcatggtccagaaccaaaaccgtggggaaataataccgagggacctgtggg

SEQ ID NO: 1405 - DNA, 530 bp, Homo sapiens
  misc_feature (1)...(530): n = A,T,C or G
nnnnnnnnnnntttttttttttttccactcagacacttatttaataactgtagaaatccaaaagaattagcatcaaatcttgaagtcgtgagtgaagctgcgggttggcttgactgggctcagccactgagctgcctcaaccggccaaggaacgggattatgatgactatgcggacttctatattgtcttcatctcattgtgtgtattatgtatttagtttcaataaagcatttgtaccaatggctctggagcttggaggaagactaaaggaatgtgtagtgattctgagtaagatgtagacctacgcagcagagctatgggggagaagattaacaaagtcctttcttccaatatcaggatagtcatgagttgcagtcccatccaaaaggtcattagggctaaaaggccctctgtgtctctgaactatgagattcttgctccctccgggggagccaaggagcttgcaactgggagtttgcagtgaatgagcaccatgacacagtcatttctgatccctctatccagctgt

SEQ ID NO: 1406 - DNA, 1881 bp, Homo sapiens
cacgcgtccggtggacacggaagtggtcgtcgtcgcggcaccggtgggagctaggcgcgaggctcggagtgcggccagcgggcggaggcggtctcgcatcggcggcgacggagggctcaggcgtcgtcgtttgggtggggggccgctgaactgacaagcgacatttcagctcctttcacccgccggaaccccggagccggggcccgctcagccggcgttaccatgaccaaggccggtagcaagggcgggaacctccgcgacaagctggacggcaacgaactggacctgagcctcagcgacctgaatgaggtcccggtgaaggagctggctgcccttccaaaggccaccatcctggatctgtcttgtaataaactgactactctaccgtcggatttctgtggcctcacacacctggtgaagctagacctgagtaagaacaagctgcagcagctgccagcagactttggccgtctggtcaacctccagcacctggatctcctcaacaacaagctggtcaccttgcctgtcagctttgctcagctcaagaacctgaagtggttggacctgaaggataaccccctggatcctgtcctggccaaggtggcaggtgactgcttggatgagaagcagtgtaagcagtgtgcaaacaaggtgttacagcacatgaaggccgtgcaggcagatcaggagcgggagaggcagcggcggctggaagtagaacgtgaggcagagaagaagcgtgaggctaagcagcgagctaaggaagctcaggagcgggaactgcggaagcgggagaaggcggaagagaaggagcgccggagaaaggagtatgatgccctcaaagcagccaagcgggagcaggagaagaaacctaagaaggaagcaaatcaggccccgaaatctaagtctggctcccgtccccgcaagccaccaccccggaagcacactcgttcctgggctgtgctgaagctgctgctgctgctgctgctatttggtgtggcgggagggctggttgcttgtcgggtgacagagctgcagcagcagcccctctgcaccagcgtgaacaccatctatgacaatgcggtccagggtctacgccgccatgagatcctccagtgggtcctccagaccgactctcagcagtgagcttgtccccagcacctgctgcctcccagccttggagtttggattcctatggaattgggttctgctggacacaacctctttttagcatcagacctacctgccatcatcaaatggctgcagattggtacatgagacctcctctttgtaggacttcttcattccttagtcagggttccctgaaggaatgaggagaaatgggaggtggcgggggggcgtggggggcagttacctgcatgcctaaaggagtaggcttgggggtggggagagagaaaacatagccttttctagttgttatataaagctgtgtaaaggcaaggctcgtttctactaaatggtcagctgtcactacatttatacttttgtatgccacaaaccctttcattcctccctgggaatcagggtagatcaggaggaactgggggggactagaacaccacgctcagtaaatccagtctaaactgggaggtaggggtattcctgttttctttaggacctcagagatgtaagcattttagcagccacacaaaatctctggctatgaaagggacttcatgaccatccagtccaatataacacttgcagacagagaaactgaggtcttccatgacttgcctagtctcccagctagtttgaggcaaaactggattcccactctggtattctttcttccctttacatcattttccctcctttataatgtcctgagagaccagaactcacaccagaatcgattat

SEQ ID NO: 1407 - DNA, 503 bp, Homo sapiens
  misc_feature (1)...(503): n = A,T,C or G
aacctccagcacctggatctcctcaacaacaagctggtcaccttgcctgtcagctttgctcagctcaagaacctgaagtggttggacctgaaggataaccccctggatcctgtcctggccaaggtggcaggtgactgcttggatganaagcagtgttaagcagtgtgcaaacaaggtgttacagcacatgaaggccgtgcangcagatcaggancgggaaaagcaacggcggctggaattaaacgtgangcagaaaanaacgtgangctaagcagcgaccaattaacacaaatgctttattgaaactaaatacataatacacacaatgagatgaagacaatatagaagtccgcatagtcatcataatcccgttccttggccggttgaggcagctcagtggctgagcccagtcaagccaacccgcagcttcactcacgacttcaagatttgatgctaattcttttggatttctacagttattaaataagtgtctgagtggaaaa

SEQ ID NO: 1408 - DNA, 671 bp, Homo sapiens
  misc_feature (1)...(671): n = A,T,C or G
tccggagaaatctaatnagatctttggcgaaggggccggccggaaggatggagagtgggggggaagttgctccccaaattcttcgaaggggaggctggggagaggaattgaccatgtaaaaggagacttttttttttggtggtggtggntgttgggtgccttgcaaaaatgaaggatncaggacgcngctttctcctggaacccgaacgcaatggataaactgattgtgcaagagagaaggggacccgngggctggcaggggccaccgnngagggaccgcatcctctgtcccccccccaaaaaaaaggattattgnaaatgaagaaccgangattcacaaagaataaagtatgttcatttttctctataaaggagaaagtgagccaaggagatatttttncgaatgaaaaagtttggggcttttttagtaaagtaaagaactggtgtggtgggngttttcttttctttttngntttccccaagaggagaaggaaattaataatacattctgcaaagaantttcagagaagaaaaaattgacctcggcagattgatgctttgataggggggagagaaaccagangaacccagntggatttgtggctatgttacttaaattgacngaaaatanagttggcattttnttcatccccncctttaattaaatttta

SEQ ID NO: 1409 - DNA, 142 bp, Homo sapiens
  misc_feature (1)...(142): n = A,T,C or G
gtgactgtttgaattncagaaggaccaacaccagataaattatgaatgttgaacaagatgaccttacatncacagcatataatgataggtcctaggtttaacagggccctatttgaccccctgnttgtggtgctgatggctc

SEQ ID NO: 1410 - DNA, 2745 bp, Homo sapiens
gcagcgaccccgcggcgacgcgccgtccctggcagccgctgagcccgacccccaggcagctcgccgctccctagcaccttctccagtcgacactctcgcgcccggagaaacatgattcccgtgacagaattccggcagttctctgagcagcagcctgccttccgagtgctgaagccatggtgggatgtgtttaccgattacctctcagtagccatgctcatgatcggcgtgtttggatgtactttacaggtcatgcaagacaagataatctgccttccgaaaagagtgcagcctgctcagaaccactcttccctttcgaatgtctctcaagcagttgccagtaccactccactgcctccacctaaaccatctcctgctaaccccatcactgtggaaatgaaaggcctgaagacagatttggaccttcagcagtacagctttataaatcagatgtgttatgagcgagccctccactggtatgccaagtatttcccttaccttgtcctcatccataccctggtctttatgctctgcagtaacttttggttcaaattccctggttccagctccaaaatagaacatttcatctccattctggggaagtgttttgactctccttggaccacacgggctttatctgaagtgtctggggaggactcagaagaaaaggacaacaggaagaacaacatgaacaggtccaacaccatccaatctggtccagaaggcagcctggtcaactctcagtctttaaagtccattcctgagaagtttgtagttgataaatccactgcaggggctctggataaaaaggaaggtgagcaggctaaggccttatttgagaaggtgaagaagttcaggctgcatgtggaagaaggtgatattctatatgccatgtatgttcgccagactgtacttaaagttatcaaattcctaatcatcattgcatataatagtgctctggtttccaaggtccagtttacagtggactgtaatgtggacattcaggacatgactggatataaaaacttttcttgcaatcataccatggcacacttgttctcaaaactgtccttttgctatctgtgctttgttagtatctatggattgacgtgcctttataccttatactggctgttctaccgttctctacgggaatattcctttgagtatgtccgtcaggagactggaattgatgatattccagatgtgaaaaatgactttgcttttatgcttcatatgatagatcagtatgaccctctctattccaagagatttgcagtgttcctgtctgaagtcagtgaaaacaaattaaagcagctgaacttaaataacgaatggactcctgataaactgaggcagaagctacagacaaatgcccataatcgactggaattgcctcttatcatgctctctggccttccagacactgtttttgaaatcacagagttgcaatctctaaaacttgaaatcattaagaacgtaatgataccagccaccattgcacagctagacaatcttcaagagctctctctgcaccagtgttctgtcaaaatccacagtgcggcgctctctttcctgaaggaaaacctcaaggtcttgagcgtcaagtttgatgacatgagggaactccccccctggatgtatgggctccgaaatctggaagagctgtacctagttggctctctaagtcatgatatttccagaaatgtcacccttgagtctctgcgggatctcaaaagccttaaaattctctctatcaaaagcaacgtttccaaaatccctcaggcagtggttgatgtttccagccatctccagaagatgtgcatacataatgatggcaccaagctggtgatgctcaacaacttaaagaagatgaccaatctgacagagctggagctggtccactgtgacctggagcgtattcctcatgctgtgttcagcctactccagcctccaggaattggacctgaaggaaaacaatctgaaatctatagaagaaatcgttagctttcagcacttaaggaaagttgacagtgctaaaaactgtggcataacagcatcacctacatcccagagcatataaagaaactcaccaagcctggaacgcctgtcctttagttcacaataaaaaagaggtgctgccttcccacctcttcctatgcaacaagatccgatacttggacttatcgtacaatgacattcgatttatcccccctgaaattggagttctacaaagtttacagtatttttccatcacatgtaacaaagtggaaagccttccagatgaactctacttctgcaagaaacttaaaactctgaagattggaaaaaacagcctatctgtactttcaccgaaaattggaaatttgctatttctttcctacttagatgtaaaaggtaatcactttgaaatcctccctcctgaactgggtgactgtcgggctctgaagcgagctggtttagttgtagaagatgctctgtttgaaactctgccttctgacgtccgggagcaaatgaaaacagaataacttatttttcgttaaagtttgactgaaacacgcttctaccaaatacagtataaataattaggtagtcttaatgcctttcctatttttttttccttttcacacaaaatgtacacaaagatcgcgtaaggagtatgtatttttaataaaaatttaattgtattttttcaatattaaaaaaaaaaaaaaaaaaaaaaaaaaaaaaaagcggacgctcgcg

SEQ ID NO: 1411 - DNA, 370 bp, Homo sapiens
  misc_feature (1)...(370): n = A,T,C or G
tttccacgcgtccgtaaagggaaagtgtcccctgcgctgctcctgctctaaagacagcgccctgtgtgagggctccccggacctgcccgtcagcttntctncgaccctgctgtcactctcactcgtcaggacgggagtcacccagctgaaggccggcagcttcctgagaattccgtctntgcacctgcttctttttancctcaaacttcttctttcgtgattgaggacgatgcatttggcgggcctgtcccacctgcagtacctnttnatcgaggacaatgagattgggctccatctctaagaatgccctcagaggacttngctcgcttacacacctaagcctggccaataaccatgttggagaccctcc

SEQ ID NO: 1412 - DNA, 1250 bp, Homo sapiens
gacccacccgtccgcccacgcgtccgccatgctccaccccccagggaacacagggtatccttgtggctgctgacggtgccttctcttcctccaccagaagcctggccaataaccatctggagaccctccccagattcctgttccgaggcctggacacccttactcacgtgtgaggctcatgggggctgggaatgtggggggttggggaatgtttgtgtcggcggggggcatccgtgcccacttctggttggcgtgcatgcatttggctgcagtggttcttacgtatttttcttaccactatggggccccatctctggggacacttgcctgaggtgggggcaggtagcatggcccccagggcgtggaagccaggtcgcagcccctccctggcctcttgccccagggacctccgcgggaacccgttccagtgtgactgccgcgtcctctggctcctgcagtggatgcccaccgtgaatgccagcgtggggaccggcgcctgtgcgggccccgcctccctgagccacatgcagctccaccacctcgaccccaagactttcaagtgcagagccatagagctgtcctggttccagacggtgggggagtcggcactgagcgtagagcccttctcctaccaaggggagcctcacattgtgctggcacagcccttcgccggccgctgcctgattctctcctgggactacagcctgcagcgcttccggcccgaggaagagctgcccgcggcctccgtggtgtcctgcaagccactggtgctgggccccagcctcttcgtgctggctgcccgcctgtgggggggctcacagctgtgggcccggcccagtcccggcctgcgcctggccccaacgcagaccctggccccgcggcggctgctgcggcccaatgacgccgagctcctgtggctggaagggcaaccctgcttcgtggtggccgatgcctccaaggcgggcagcaccacgctgctgtgccgcgacgggcccggcttttacccgcaccagagcctgcacgcctggcaccgggacacggacgctgaggccctggagctggacggccggccccacctgctgctggcctcggcttcccaagcggcccgtgctcttccactggaccggtggccgcttcgagagacgcacggacatccccgaggccgaggatgtctatgccacacgccacttccaggctggtggggaccgtgttcctgtgcctcacacgctacattggggacttcatggacc

SEQ ID NO: 1413 - DNA, 404 bp, Homo sapiens
  misc_feature (1)...(404): n = A,T,C or G
gcgccacgcgtccggatgaagctctgcccacggncctggtcggngtgntcatcgaacagnccacgccgatngtgtccctgntcttncagnggntcctgcggctncactaccccnagaaacacatgcnactnttnatncacaaccacgancagnnccacaaggctnaggtggaagagtnnctggcacancatgntancgagtaccatgtntgngaagcnnnngggccctgaggngcggatggcgaatgcagnngccaggaacatgggcgcagacctgtnccggcnggaccgnagntgcacctactacttcagcgnggatgctgncntggncctgnccgagcccaacagnctggggctgttgatccaacagaacangnaacgncaattgccccnntgatgacccgg

SEQ ID NO: 1414 - DNA, 495 bp, Homo sapiens
  misc_feature (1)...(495): n = A,T,C or G
acgcgtccgatttcttcaacttgacttccatgcaagactcagaaatgatcctcacagccgccttccacttctactcagaacctccacggtggccccgggctcgtgaggtattctgcangccccgagctaagaacgcatcctgccgcctcctgaccccagggctgcctgcacgcttgcactaatcttccgcagtctttcccagaacaccgccactcaggggctgctccgcggggccatggccctgacgcctccaccacgtggcctgtggcaggccaaggacatctcctcaatcatcaaggctgcccgaagggatggagagctgcttctctctgctcagctggatactggggagaaggaccccggagtgccacngnccagttcccacatgccctatatccttgtctacgccaatgacctggccatctccgaacccaacagtgtagcagtgtcgctacagagatacgacccatttccagctggagactttgagcctgg

SEQ ID NO: 1415 - DNA, 403 bp, Homo sapiens
  misc_feature (1)...(403): n = A,T,C or G
tcnccacgcgtccgcgaggctcctgaaccagggccattcaccaggagcatgcggctccctgatgtccagctctggctggtgctgctgtgggcactggtgcgagcacaggggacagggtctgtgtgtccctcctgtgggggctccaaactggcaccccaagcagaacgagctctggtgctggagctagccaagcagcaaatcctggatgggttgcacctgaccagtcgtcccagaataactcatcctccaccccaggcagcgctgaccagagccctccggagactacagccagggagtgtggctccagggaatggggagggaggtcatcaagctttgctactgtcacagactccacttcaagcctacagctccctgctcacttttcacctgtccactcctcggt

SEQ ID NO: 1416 - DNA, 181 bp, Homo sapiens
  misc_feature (1)...(181): n = A,T,C or G
gacgcgtggggggaaatttagggctttcnccttaacgcccactgctcctgtgacatcaaggataacaaactgcnnctggacatcaacgggtncactaccggccgccgangtgacctgaccnccattcanancatcaaccggcctttcctncttctcatggccaacccgctagatagggccc

SEQ ID NO: 1417 - DNA, 503 bp, Homo sapiens
gccacgcgtccggtgaaacacgtccagccagcggtctctgctgctccttttgctgttgaccctacgggatgtggacagctgccagggacccgaacttgtccgggagctcgtcctggccaaggtgaaggctctattcctagatgccttggggcccccagcaatggatggggaaggtggggatcctggaataaggcgtctgcctcgaagacatgccgttgggggtttcatgcacaggacctctgaaccagaggaggaagatgtctcccaggctatccttttcccagctacaggtgccacctgtgaggaccagccagctgccagagggcttgcccaggaggctgaggaaggcctcttcacttatgtattccggccatcccaacacatacgcagccaccaggtgacttcagccaagctgtggttccacacaggcctaggcaggaagagcacagcagccgccaatagctctgcgcccctgctagatttctggtgctatcatttggggg

SEQ ID NO: 1418 - DNA, 421 bp, Homo sapiens
  misc_feature (1)...(421): n = A,T,C or G
gcgtccgaccacttatgatgtcgctttaccggagcctggccgggagggctccggccggngcagccgctgtctccgcctcgggccatggtngcgcggacacnatcaccggcttcacagaccaggcgacccaagacgaatcggcagccgaaacaggccagagcttcctgttcgacgtgtccagccttaacgacgcanacnaggtggtgggtgccgagctgcgcgtgctgcgccggggatctccagagtcgggcccaggcagctggacttctccgccgttgctgctgctgtccacgtgcccgggcgccgcccgancgccacgcctgctgtactcgcgggcagctgagcccctagtcggtcaagcgctgggaggcgttcgacgtggcggacgccatgaggcgccacccgttgtgaaccgcgcccc

SEQ ID NO: 1419 - DNA, 324 bp, Homo sapiens
ccgcgtccggagatgccggcccgctccttcccagctcctccccgtgcccgctaacacagcacggccgcctgcagtctcctctctgggtgattgcgcgggcctaagatgtgtcctggggcactgtgggtggccctgcccctgctgtccctgctggctggctccctacaggggaagccactgcagagctggggacgagggtctgctgggggaaacgcccacagcccactgggggtgcctggaggtgggctgcctgagcacaccttcaacctgaagatgtttctggagaacgtgaaggtggatttcctgcgcagccttaacctgagt

SEQ ID NO: 1420 - DNA, 564 bp, Homo sapiens
  misc_feature (1)...(564): n = A,T,C or G
ccccgcgtccggaataaggcgtctgcctcgaagacatgccgttgggggtttcatgcacanggacctctgaaccagaggaggaagatgtctcccaggctatccttttcccagctacaggtaatgaagttggggattggcaggtcaactttgaagagtagccggtacctacttcatgggcttgggaatcaggcagctctgggtatgaatggcagccccacaactcagctggctttgcggcaaggggccagttcctaagcccctctgatcgacatcaaacaggtggtagcctctacctcaacatcagataggtggtagcctctacttctcaagcgggactgatccagtgagcctagcatgcctggaatacaaaaggggaagctaaggctctgtagagacagcttctgttgctgcctgtggtctgtcctgcgttttgtgccccctactctccccaagccccatctggctcactctgaggtctcctcgcttccctgccttcatctccaggcagcgtagtagtaagtaccgaaagtatggatttcatatcaagtggaatcccaagtcttg

SEQ ID NO: 1421 - DNA, 515 bp, Homo sapiens
  misc_feature (1)...(515): n = A,T,C or G
aagntgtaacggcagccgaattccggatctacaaggactacatncgggaacgcttngacaangagacgttncggatcagngtntatgaggtgctccaggagcacttgggcagggaaacggatctctttctgnnngacagccgtaccctntgggnctaggaggagggctggctggtgtttgacannacagataccagnaaccaatgggtggnnaancnngaggcacaacctgggnctgcagnnattggngggagangctggatgggcaagaagtcatcaaacccncaagnttggncggggcntggaaatggggctngtaacggggctcnncagnaacaaagcnagnanccttttaatgggangggctttttantttcaaagggncaacnggnaaggnntnaacttttncgnaaagnnaattncngggttncaacnggngggaggcaaaaaaccaagncnggcaagnnccaaggaactccggcttntacaaagaaanggcntcaaaagaaaacccaa

SEQ ID NO: 1422 - DNA, 361 bp, Homo sapiens
  misc_feature (1)...(361): n = A,T,C or G
catctccgtcctctacaaggatgacatgggggtgcccaccctcaagtaccattacgagggcatgagcgtggcagagtgtgggtgcaggtagtatctgcctgcggggctggggaggcaggccaaaggggctccacatgagaggtcctgcatgcccctgggcacaacanggactgattcaatctgcatgccagcctggaggaggaaagggagcctgctctccctccccacaccccacccaaagcatacaccgctgagctcaactgccagggaaggctaaggaaatggggatttgagcacaacaggaaagcctgggagggttgttgggatgcaaggaggtgatgaaaaggagacaggggggaaa

SEQ ID NO: 1423 - DNA, 248 bp, Homo sapiens
  misc_feature (1)...(248): n = A,T,C or G
cgtccggccgcaacctgcacagtcatgcccgggcacgaactcaggacgctgaatggctctnagatgctcctggngttgctggtgctntcgtggctgccgcatgggggcnccctgtntttggccgangcgagccgcgcaagnntnccgggaccctcanagttncactncgaanactccanattccgagagttgcngaaacgctncgaggacctgntaaccaggctgcgggccaaccagagctgggaaga

SEQ ID NO: 1424 - DNA, 508 bp, Homo sapiens
  misc_feature (1)...(508): n = A,T,C or G
agcantttaaaacagcaaantaaagtagaacatgccgccgccacttttagttgaacaacgctaaagggcgcaactggtcctttgaacatctcttatgaaggcggaaaatatgttctaagagatctttcaaaaccaacaggcacccaaatcatcacatatgatttgcaaaacagacaaagccgccttccgggcacgcttgtctcaagcacaacgaaaacatttacatcttcatcacagcgggcagccgttgacgcacactataacctcggtaaagtgtacgattatttttattcaaactttaaacgaaacagctatgataacaaaggcagtaaaatcgtttcttccgttcactacggcactcaatacaataacgctgcatggacaggagaccagatgatttacggtgatggcgacggntcattcttctctccgctttccggctcattagatgtgacagccgcatgaaatgacacatggcgtcacccaagaaacagccaacttgatttat

SEQ ID NO: 1425 - DNA, 336 bp, Homo sapiens
ccgcgtccgatttggtcaggttattttgtgatttcggtgatgaatttgaagttttagatacaacaggagaagaaccaaaagaaattttcatttcaaacataacgcaagcaaatcctggcattgttacttgccttgaaaatcatcctcacaaactggagacaggacaattcctaacatttcgagaaattaatggaatgacaggtttaaatggatctatacaacaaataacggtgatatcgccattttcttttagtattggtgacaccacagaactggaaccatatttacatggaggcatagctgtccaagttaagactcctaaaacagttttttttg

SEQ ID NO: 1426 - DNA, 2755 bp, Homo sapiens
  misc_feature (1)...(2755): n = A,T,C or G
caaccccgcgtaccaccaaccccgcggccccgaggaaggcctcccggagtctcggagacgtgtctgtctgtgaggcgctgggtgcacgtccccagggctctgggctaggaaggcagcggcgaggtgcctccccacgtacccctcgcgggcccagccgagcaacgtggggcgaaggcggcggcgaaggcccgggctgggagcgttggcggccggagtcccagccatggcggagtctgtggagcgcctgcagcagcgggtccaggagctggagcgggaacttgcccaggagaggagtctgcaggtcccgaggagcggcgacggagggggcggccgggtccgcatcgagaagatgagctcagaggtggtggattcgaatccctacagccgcttgatggcattgaaacgaatgggaattgtaagcgactatgagaaaatccgtacctttgccgtagcaatagtaggtgttggtggagtaggtagtgtgactgctgaaatgctgacaagatgtggcattggtaagttgctactctttgattatgacaaggtggaactagccaatatgaatagacttttcttccaacctcatcaagcaggattaagtaaagttcaagcagcagaacatactctgaggaacattaatcctgatgttctttttgaagtacacaactataatataaccacagtggaaaactttcaacatttcatggatagaataagtaatggtgggttagaagaaggaaaacctgttgatctagttcttagctgtgtggacaattttgaagctcgaatgacaataaatacagcttgtaatgaacttggacaaacatggatggaatctggggtcagtgaaaatgcagtttcagggcatatacagcttataattcctggagaatctgcttgttttgcgtgtgctccaccacttgtagttgctgcaaatattgatgaaaagactctgaaacgagaaggtgtttgtgcagccagtcttcctaccactatgggtgtggttgctgggatcttagtacaaaacgtgttaaagtttctgttaaattttggtactgttagtttttaccttggatacaatgcaatgcaggatttttttcctactatgtccatgaagccaaatcctcagtgtgatgacagaaattgcaggaagcagcaggaggaatataagaaaaaggtagcagcactgcctaaacaagaggttatacaagaagaggaagagataatccatgaagataatgaatggggtattgagctggtatctgaggtttcagaagaggaactgaaaaatttttcaggtccagttccagacttacctgaaggaattacagtggcatacacaattccaaaaaagcaagaagattctgtcactgagttaacagtggaagattctggtgaaagcttggaagacctcatggccaaaatgaagaatatgtagataatggactgggatatattgtatttctcatgttaaagcctcttcccttgaaattaaaaaaaaattttaactgataaaacttagggcaacattaattaatgtatattcttacctgaattgttatactttttgaaaatcctgtgacttgcctgtttctccccgctccaacgaaatcattaactctcctaaaatgtgtttcattctagtaagaaaacctcaaaggatattgtaggatataaatcttacttgaaaacatagctgttgaaatgttttggccttttggagtgggggaaggacaaatctgatcctgtaatctttttctttccagtaatcccttgtgtctgttgcatgaggacatggacaataaagtagtatatgatcctcagatacagggagaaggacaaggcatacagcttattgattagagctggcaagcatctgctcattatgtttggaattgctttctataagaaaattgcccactactactaacttgatcaacaatgaattcaaaatagttaacctatgaaataacatcctctcaaatgtttgctgatgaagtacaagttgaaatgtagttattggaaaagtctgtaacctgtggatcatatatattcaaagtgagacaaaggcaaataaaaagcagctattttcatgaatagaacaaagttgatttcaggaagtataaattattattctgcacccgaacaaggaacagaaattattgcatctgtggaacatatatctggagttactatactttactgaagagcaaggcataaatttagactaaaatccatccagattacactcattctttaggctactcctggatacttcatttaaatttgattttcgaggtagtgagatgtcggcaaggtttgtcctgtatattaggaataaaggaaaagttctaaactgcctctgcaatgacttgtagtcagtggaagagtatcactttcccctgatcatgaccactaaactgtaaattgatataaattagttttctctcgagttacacccaagtaatgaagacttaagagaaccttggttgaaataaatttccaatagtttggagactcataaataccatgcaggtgtaaccactgccaataggctgtttctatgcttatttcctattttgatttttactttgaagataggaatatctaaattatatctctagggagaaaatgttgtaaaaaattaaaagtacatccctgatttaaaattaaagttccaaaaaactgaaaaaaaaaaaaaaaaaaaaaaaaaaaattcctgcgggcccgnaggctttttcccnttaggtgaggg

SEQ ID NO: 1427 - DNA, 443 bp, Homo sapiens
ctttagggagccgccccacgcgtccgcgccattttcttttagtattggtgacaccacagaactggaaccatatttacatggaggcatagctgtccaagttaagactcctaaaacagtttttttttgaatcactggagaggcagttaaaacatccaaagtgccttattgtggattttagcaaccctgaggcacctttagagattcacacagctatgcttgccttggaccagtttcaggagaaatacagtcgcaagccaaatgttggatgccaacaagattcagaagaactgttgaaactagcaacatctataagtgaaaccttggaagagaaggtcacgctgatgcaagaggtgggttcccatggtcttgggcagcttcaccctgtggttatgcaagcctgatgtaaatgctgacattgtgcattggctctcttggactgccca

SEQ ID NO: 1428 - DNA, 159 bp, Homo sapiens
  misc_feature (1)...(159): n = A,T,C or G
agctggaggnccccggcccccaantgcaagtcgactntantggatccnaagaattcggcacgagctnacgctgtcctcacccgctnntctttgatgtccnngatccccngcctctgnagtnngtnatggatgctnccnaccagtctgnccggacctacg

SEQ ID NO: 1429 - DNA, 552 bp, Homo sapiens
  misc_feature (1)...(552): n = A,T,C or G
nccgcgtccgaccttccagtagccggcggcggtgtctcaggcggcaatggaacggatccgagcctgtggccgcccatcagggggaagaggccgtcctgtccttcctgggggactggcagcacaaataaaaatttgcccattatgtcaacagcatctgtggaaatcgatgatgcattgtatagtcgacagaggtaccgttcttggagacacagcaatgcagaagatggccaagtcccatgttttcttaagtgggatgggtggtcttggtttggaaattgcaaagaatcttgttcttgcagggattaaggcagtttcnattcatnatacagaaaaatgcccagcatggngatntaggaanccaacctttttttttnngtgaagaatgatgttttttaantaaagaagaaaccagggcntggaagcttttacctttaaaccacaatttgnncgnaacnttaaatttcnattncctttnnttnttnnccaantcaaatccntttttggtttcccttttnaaanggnngnnccccccnaattcttnttttntttttt

SEQ ID NO: 1430 - DNA, 289 bp, Homo sapiens
  misc_feature (1)...(289): n = A,T,C or G
cccgcgtccggcttcccaggaacgtcatnaaggcctgctctggaaacgtttatgcccatcatgcacgtggttgtactttgatgctcttgaatgtctcccagaggacaaagaggctctgacagaggagaagtgcctcccacgtcagaaccgttaccgatgggcaggtagctgtatttgggtcagactttcaggagaagctgagcaagcaaaagtacttcctggtgggtgcaggggccattggctgtgaattgctcaagaactttgccatgattgggctgggttgtggaga

SEQ ID NO: 1431 - DNA, 355 bp, Homo sapiens
  misc_feature (1)...(355): n = A,T,C or G
ccggggacaacccaacccaacggccgggggacggagaaggcggnagcggctattctaggcggcccaggcggcaggngaggaggagaaggaggagggtggcngacggncttgnctncnnctccttgaggagttggcngcngcgcgacccggtnaaccgncattgangtccaagatcgccgctgtccaagaaacgtagcgtgtncnnncctgatccaaagccnggntctaactgctnccctgnccagnccnngtngacngaantgccctnggngccaaccaacggaatggccaagaacggtngngaagcatacatagacnagggcctntactcccggnngctgtatgtgtngggcca

SEQ ID NO: 1432 - DNA, 261 bp, Homo sapiens
  misc_feature (1)...(261): n = A,T,C or G
ttaaagatcaccatgctgtcccagggcgtgtccatgctctattccttcttnnggccagggtgccaaactcaaanaacggntggatcancccatnacagagattgtgagccgtgtgtcnaaacgaaagctgggcccccacctgccgggcccttgtgcttgagctttgctttaaccaccagagcggnnaggatttcnaggnttccctatttccgntncaccatcccntgaccccntctgctcctntangcctggccccttgtc

SEQ ID NO: 1433 - DNA, 383 bp, Homo sapiens
  misc_feature (1)...(383): n = A,T,C or G
agggagtcgaccccgcgtccgctgcagagcgcctntgcctctgtngangncacgtcgnntagaggagctcaaagncactctgnccagnccagacaagctccctggattcaagangtnccccattgnctttgaganngatgatgacagcaactttcatatggattncatcnngggctgcnnccaccctccggcangaaaantatgnatttnnttttgangnaccgggcacaagannannnnganngcagggaatancttccaagccattgncacgaaccacagaagacgtggttgcccttgtgtntcngnngctgtacaaggntggcnaggggcaccnacagcttgactcctacaagaatnggttnnctaaacttggccctgcc

SEQ ID NO: 1434 - DNA, 674 bp, Homo sapiens
  misc_feature (1)...(674): n = A,T,C or G
cgtaggttatccttaagtgtcgtgctcntcactctgcccaggcagcatctggtgcaggctctatttgtattttgtgactgccctgctcctctatgctggacatcagatatccagcgactatggtaaggagtgaactggagactgcctatgaaggaccaatgtatttagaacctctctccatgaaccgctttaccacagccttaataggtcagttagtgntgtgcaccttgtnctcctgcgttatgaagacgaagcagatctggcncttctnggcacacatgcttcctctgctggctcgcctctgcctccttcctctggagaccatcgtcatcatcaacanaatttgctatcgattgtttacaggattgggaagtnnctgtccttctagggcctaatctcctagtacccgtatnacctcgctaaagtctgcataccggggagttagttcaggtaggggaaggtgtaccggncttntggccttggggaangtacctgtgngaccagcttgggtggtgncacgtgctattcatggtcttctggctttgntttatttgctctttnaganctacttctacttgagcaccagaagatnaaggctgcatcccgggagaagcttctcttgcnttagctgncaggcatcgccnantgctgaagacgccttantccttttgggt

SEQ ID NO: 1435 - DNA, 206 bp, Homo sapiens
  misc_feature (1)...(206): n = A,T,C or G
gcnccccgcgtccgcagttattgntggaggncacanggaagaggattcgttncccagtcctgcattntatccatggantgacagaccctgnnttaangnntnncagngcctntcatgtntcatcttntcnnagacattntnctgngctgntngnctntgcttgcctgnttattcttcctgtcttactcaggtatgttctttggcat

SEQ ID NO: 1436 - DNA, 291 bp, Homo sapiens
  misc_feature (1)...(291): n = A,T,C or G
ccgcgcgtggccgccgctgctccaactaccacgtgcgcttccgctgcccactagaagcctcgtggggctgcgtggggcccgtggggtccctgctcggggagctgtgggccaggccgtcgcttgcgccgccgccactgcccaagccccgctggggatgcgtgtcccgggcgtcctctggaggcgcagaantgcgtgcggcctcggtgtccagggtgcagccttgacanctntnaatnnccggaccacatcctcctgggctcggtggtcaccccatctgggcaaccactgcta

SEQ ID NO: 1437 - DNA, 339 bp, Homo sapiens
  misc_feature (1)...(339): n = A,T,C or G
cgacccacgcgtccggctgatcagccaaagcctgtgaaggaatacaagtatcctgagaaattgccaggagaattatatgatgcaaacacacagtgcaagtggcagttcggagagaaagccaagctctgcatgctggactttaaaaaggacatctgtaaagccctgtggtgccatcntattggaaggaaatgtgagactaaatttatgccancagcanaaggcacaatttctgtgggcatgacatgtggtgccggggaggacagtgtgttgaaataatggtgatgaaggccccaagcccacccatggccacttggtcggactggtnttttttggtcccca

SEQ ID NO: 1438 - DNA, 536 bp, Homo sapiens
  misc_feature (1)...(536): n = A,T,C or G
accctactaaagggaataagcttgcggccgccggtcgctccgggacgcggaccgccaggacttgaacgcaactcccaattgcagaaaattggcaacgtctctgaagagcccttgcttttgcctggacccccagcatcatggtttcccatttcatggggtctctcagtgtcctgtgtttccttctgctgcttggattccagttcgtctgcccacagccctccactcaacacaggaaggtcccgcagcggatggcggcggagggcgcccccgaggacgacggcggcggcggcgccccgggagtgtggggcgcctggggcccctggtcggcctgctcgcgtagctgcagcggcggcgtgatggagcagacgcggccctgcctgccccgctcctaccgcctgcgcggcggccagcggcctggcgcccctgcncgcgccttcgcnnaccncgtgannccnccctnccncancncccttncanntcacnacnaaccctangagnctcnatncccctcnnnnacncaccccaccnnnnnnnnn

SEQ ID NO: 1439 - DNA, 269 bp, Homo sapiens
  misc_feature (1)...(269): n = A,T,C or G
gantgttcaccatggattacaactacccgctgtgtgcactgcaggcctttgccantgccctgtccagcttcgacagataagctggngtgngagtagaggcctcttcgtgcnctttggggtngcccactcctgggagnggaagcntgcctgcctncctgtggagacanccctgnttatcctctgtatatnngcctnccgccagatnaanctttggccctnagtgngctcccnngcccttccagncaagaactggntcctttggntctnct

SEQ ID NO: 1440 - DNA, 664 bp, Homo sapiens
  misc_feature (1)...(664): n = A,T,C or G
ccgcngtggcggcccggnngggcaggtacagaaatggtnatttttttatttcatncaaagatctgggctatgactatagctatctacaagatggggnccagactcttttcangactcattaaantcctatttggaacaaagcgagtcggatctggtcatggctccttggggccgcnnatnngtaggggcccgtcctcacttccctgctggcanggcttgngagcttnctgtgtcntcacaaganaaagcagcttccttaagaaaagcanccactcctcatggagaaagaggatttacccacaagcttgtatcanagccattttataaaaggcttaagcaatataataggggccaaaaagccttgaccttactnctaacttaaaagtaatgtccaggtttcccaaanaanatctngctngtattttttttgtaaaagacccattttcaaaaattntaacctanatccaaantggtaccctttnttccaactcaaggtggaacnanccnggcctttgcctttgctggccttanctcaancccctttaaanattttccccctaagccccttttttctaaaagaaaaggatcctttttttgnaantgnnggaacctnttattttttttttgaaataaaaaggncntttnttttaaaaaaattggnaaa

SEQ ID NO: 1441 - DNA, 160 bp, Homo sapiens
  misc_feature (1)...(160): n = A,T,C or G
cgtncgggaggncnggcccttgcgcttnttnaataggacatgtcactgcaacggcaanttntcaggacacaacctgngggacgtgccgnccagggnggagaggagctgtntgtgaccagagggttctcatagtcaggagaaancttntggacttaagnna

SEQ ID NO: 1442 - DNA, 3521 bp, Homo sapiens
cccacttccgacgacgtggagctgattggagaagaggaagatgtgagtgtttacgacattgctgaccaccctgactttaggttccgtacaactgacatcgtcatccgcatcggcaatactgaggatggggctcctcacaaggaggatgagccatcggtgggccaggtggcccgtgtggacgtcagcagcaaggtggaggtggtgtgggctgacaactcaaagaccatcatcctgccccagcacttgtacaacatatagtctgagattgaggagtcagactacgattcggtagaaggcagcaccagcggggcatcctcggatgaatgggaagatgatagtgacagctgggagacggacaatgggctggtggaggacgagcaccccaagatagaggagccccccatcccacccctggagcagccggtggcccctgaggacaagggagtggtgatcagtgaagaggcagccacagctgccgtccagggggctgtggccatggctgcccccatggccgggctgatggagaaggctggcaaggacgggccacccaagagcttccgggagttgaaagaggccatcaagatcctggagagcctcaagaacatgactgtggagcagctgctgacgggctcgcccacctctccgactgtggagcctgagaagccaactcgggagaagaagtttctggatgacatcaagaagctacaggaaaacctcaagaagaccctggacaatgtggccattgtagaggaggagaagatggaagcagtgcccgacgtagagcgcaaggaggacaagcccgaggggcagtcacctgtgaaggctgagtggcccagcgaaaccccggtgctgtgccagcagtgtggcggcaagcctggcgtcaccttcaccagcgccaagggcgaggtcttctccgtactggagtttgcaccctcaaatcattcttttaagaaaattgagttccagcctccagaagccaagaagttcttcagcacagtgcggaaggagatggcgctgctggctacctcactgcctgagggcatcatggtcaagacttttgaagatagaatggacctcttctcagctctcatcaagggccccactcgaaccccctacgaggatggcctctacttgtttgacatccagctccccaacatctacccagccgtgcccccccacttctgctacctctcccaatgcagtggccgcctgaaccccaacctgtatgacaatgggaaggtgtgtgttcagcctcctgggcacctggattggaaagggggacagagaggtgggacaagcaagtccagccttctccaggtgctcatctccatccaaggtctgatcctggtaaatgaaccatactacaacgaagccggcttcgacagtgaccgaggcctgcaggaaggctatgaaaacagtcgctgttacaatgagatggcgctgatccgcgtggtgcagtccatgacccagctggtgcggcggccccccgaggtctttgagcaggagatcaggcaacactttagcactggtggctggcggctggtgaaccgtatcgagtcctggctggaaacccatgccctgctggagaaggcccaggcactgcccaacggggtgcccaaggccagcagctcgccagagcccccagctgtagccgagctgtcagactccggccaacaagaacctgaggatggagggccagccccaggagaggcctcccagggctcagactcagagggcggtgcccagagcctggcctcagctagcagggaccacacagaccagacttcggagaccgcaccagacgcatcggtgccacccagtgtgaaaccaaagaagcggagaaagagctaccggagcttcttacctgagaagagtggctaccctgacatcggcttccccctcttcccactttccaagggtttcatcaaagagcatcccgggtggttcctgacgcatttccgggctgccctgctagaggcaggcatgccggagtgcacaaaaggacaagtagctgccaggcacagaggaaagagcatcaccgtgggagaggccagccgccgcctgctcactcccccccggaatcacccctcttcccatgcccctctgtccccactgcaaacccactgccctcttctccccaaggtgagtttgatgctgaagtgcaagaagtgtgttgagatgctgccgtttctattttgaagcgagctttcaacaggcgggtcccctgtggcaaagaaaatcggaaccctgttgccgattttccatttgtcaccccagcagaatgtccggcacttgctcccttgctgccccttctcaggtcagaggcgggtgttccagggcctgccgcggggctctctgggccggttccctgcagacccgcaggagagcacatgtgccttgcatgaagtgtgggttgcgccaacaattcccctggtccctttcaacctgtttagttcaactcaagcctccctgtgtcccagaccctcctgctgccaccaccacccaggtcctccctagtcctccagcgtcaacactatcccttgggagttgtagctgctgtcactgactcccggctatacatggcctgtcgaccacgttatagccctcaggcctgttgaacttgctctctaagagaggttgggaccaggctaggttccgggtgacgcccaggagaggtggtggccttcacacatgcacatggagttgaggaccagggagctgcagggaaagcaacagctataggtgccttgctcttctgtcggaggctgctgggggcaagagcagctgcacaaggccagggcaagtgctagggcccctcccccatcacatggtcacactgggacaggcgtgcagctcactgaactccaagcgagccagccctctcttggactagaaggcctactgtcagcccttcgcttacaaactgcaggctcaatccgaaggggacggccggcgggggctctcctagtgcccagagacaggcccagaggtttacaagttttctaagcttttgataatgtgaagctccaggccgagaggatgctgttgagcacattgcagctatgtaatttttggtgtatgtatgtaatatttaaggttggaaaaaaaactcaaaagcaaagatattaactcttattagaaaaaaaaacaaaaaaaaagccaaagcatgatgcgtcttgtcagccttaagtgggctccacacctgtgctgtgctgtgaccgcccagccagcagagctgcgggaggatggagccggaccacacaccgtggcatttggaaccgagtcggtatcttgtttgagaaacacccggagtgactggtggggctgtgcttcccagtgcattgtacatgtggagatgtgaatgcctactgcttacgatatctgtataaagtgctgtgtgattaaacttttttttacttgcatttattattattttttttttttgttggctcattagcaagacaaggtgacaccattaaacctccctctgccattaaaaaaaaaaaaaaaaaaaaaaaaaa

SEQ ID NO: 1443 - DNA, 631 bp, Homo sapiens
  misc_feature (1)...(631): n = A,T,C or G
acccgcccataaaggagctggagcccagcagggggcacttgcctgggggccctgnngggcaaaaggctacaagcaggagctgatgaccctcatgatgcctggtgacaaaagaatttctgcctaccctgaaagccttatcaaatggacaccatccatgaaagcaagcttggcacaagtgtatgaaagatctgaggtataagctcttggcttggagttcctcaatgactacccacctttacgatgcacccacagtgaaagttcctcacaccctggtccaccctaacgtgggcacccanggtaacatatgcctggacattctgaaggagaaagtggtctggccccgtatggatatcaaggaccattctgcttctntattcaagtggctggctanggacaactnaacatttgataggccctttggacacacatgctnncaagctntggggaaaccccataacttttaaagaaagtaccttgnangggtcaaggcgccantgggctnacacctnggaattccaancanctttttnganggcccaaggggggggtgggantggancaaccttnnccntaaaaagggccaagggccttnncaaaaattggggaaaanggnattcccttttttnaaaaa

SEQ ID NO: 1444 - DNA, 322 bp, Homo sapiens
  misc_feature (1)...(322): n = A,T,C or G
cgcgtccgctccgagatcctgtctctctgccaacgccgcccggatggcttcccaaaaccgcgacccagccgccactagcgtctccgccgcccgtaaaggagctgagccgagcgggggcgccgcccggggtccggtgggcaaaaggtgagtgatgcagcctaccactcgccgggcctgccatgccctaggcattggtccccagagcaaaagatttctaggaccacccccctctcgccacctcctggagccggggagatctgcgggttcagganaacacaccatgagctcggggcctggcattcccctgggcatgggtgtcnag

SEQ ID NO: 1445 - DNA, 559 bp, Homo sapiens
  misc_feature (1)...(559): n = A,T,C or G
aaaaaggacaaaaatgcatttatttaatatacaagggctcaaccgaggcttaatttaaaagacaaaaacaaaacaaaaataccacagctcaagataaagagtcctatacagaaatcacaaaaaggacagaccatctaaggaaaaattaaaaagacnacacaaggacaggctgggcagcctgggtcagggctcctggctggtgacctgctttgagtaggtttcttgcaggtacttcttaaaagctgtggggtttttccagagctcggcagcatgtgtgttcaagggactatcaatgttgggttctcctanaaggctctggatggagagcaaaatggtcctgacatcatacagggcagaccacttttcctttcaggatgtccaggcatatgttccctgggtgtncacgttgggggtgatagcaggggcgtgagggaacttcacttgtggggccgcattgtaagggtagccaactggggnaactctanccgaggagcttatacctcaggtctttnatattactgttccaacctnctccattgggatgggtcccttacccatt

SEQ ID NO: 1446 - DNA, 347 bp, Homo sapiens
  misc_feature (1)...(347): n = A,T,C or G
ctcggcgggttggtctacgctgtgcgcggcggacgtcggaggcagcggggagcggagcggggccgccggggcctntccagggccnnancggcagcagttgggccccccgccccggccggnngaccgaanaacgcaggaagggggncggggggacccnnccccagtntgtccggatccatttaactcnaacgttggaagaaccctanccccnnacatgatancgncttggtgttcaancgangtnannacactnnccgtatacccaccccgatggattttaaggnttttcccancananggaggacctcncngacctccagntcaccatcctagggccctggtgagtt

SEQ ID NO: 1447 - DNA, 242 bp, Homo sapiens
  misc_feature (1)...(242): n = A,T,C or G
actggcagcaaatgcttttcttgcccagagaataagcagcattanctccatangtgctctgcgtgaagcagcaggagcngatgtagaagaggtcatagacatgaatgactaccagaggaggnggnttgcttncnggatcatagatatgtntgtttaatacagcaactgatcngaagatngctattntgggatttgnattcaaaaaggacactggtgatacangagaatnttctagtatatat

SEQ ID NO: 1448 - DNA, 402 bp, Homo sapiens
  misc_feature (1)...(402): n = A,T,C or G
ccacgcgtccgggcgctggctgccccgtccgctctccgcctccgccgcgccctcctcgnncgggatgggcccccccgccgccgccggatccctcgcctcccggccgccgccgttgcgctcgccgcgctcgcactgaagcccgggccctcgcgcgccgcggttcgccccgcagcctcgccccctgcccacccgggcggccgtagggcggtcacgatgctgccgnccttaccctcccgcctcgggctgctgctgctgctgctcctgtgcccggcgcacgtcggcggactgtggtgggctgtgggcagccccttggttatggaccctaccagcatctgcaggaaggcacggcggctggccgggcggcaggccgagttgtgccaggctgagccggaagtggtggca

SEQ ID NO: 1449 - DNA, 238 bp, Homo sapiens
  misc_feature (1)...(238): n = A,T,C or G
ttatggaccctaccagcatctgaaggaaggcacaggcaggctggccgggcngncaggccgagttgtgccagngctgagccggaantggaggcatagctagctnggggcgcccggctcggggngcgagagngccanttccagttncncttccgccgctggaattgntccanncacancanggcctttggacgcatcctgcaacaggacattnnggagacggccttngngttcgccatca

SEQ ID NO: 1450 - DNA, 474 bp, Homo sapiens
cgcggacgcgtgggcttttgcacaatcacgcccacatttggggttggaaagccctaattaccgccgtcgctgatggacgttggaaacggagcgcctctccgtggaacagttgcctgcgcgccctcgccggaccggcggctccctagttgcgccccgaccaggccctgcccttgctgccggctcgcgcgcgtccgcgccccctccattcctgggcgcatcccagctctgccccaactcgggagtccaggcccgggcgccagtgcccgcttcagctccggttcactgcgcccgccggacgcgcgccggaggactccgcagccctgctcctgaccgtccccccaggcttaacccggtcgctccgctcggattcctcggctgcgctcgctcgggtggcgacttcctccccgcgccccctccccctcgccatgaagaagtccattggaatattaagcccaggagttgctttggggatgg

SEQ ID NO: 1451 - DNA, 239 bp, Homo sapiens
  misc_feature (1)...(239): n = A,T,C or G
gactgagcacagcaccaactngaggggggccagggggtgcgggactcgagcgagcaggaaggaggcagcgcctggcnccagggctttgactcaacagaattgatacacgtntgtaatcgctggcgtgccccgcgcacaggatcccagcgaaatcagatnncctgaagtccattggaatattaatncccaggagttncttnggggatggctggaagtgcaatgtcttccaagttcttcct

SEQ ID NO: 1452 - DNA, 416 bp, Homo sapiens
  misc_feature (1)...(416): n = A,T,C or G
tcgccacgcgtccgcgcgtcgctcctgggaggtccacccgcggtgcgtcccactccttgtgcgccgctgcccgaatgcaaaggtcttcccctggacgaaggcccangcaaaacactgaagagactgctgagtattcctctttcaagggaggttacgccaaaggattggaaggtgagagcttggggtgctctggcagcagtgaancaggtagctctgggacacttgagatcccgtcctctctgtctctgtataaatctggagcactagacgaggcatcancataccaaaatcgcgactactacaactttccgctggctctgtccgggccgccgcaccccccgccccctacccatccacacgcccgtatcaagctgganaacccattggactaccggcagcgcctgggctgcggcggc

SEQ ID NO: 1453 - DNA, 750 bp, Homo sapiens
  misc_feature (1)...(750): n = A,T,C or G
ccacgcgtccgtctagatcgcgagcnnccnccctttttttnntctttttttttttttttttttttttgccgtcatctctttatttgctgccagcagagtccaccaagcctgccgggcagccctgctgcccaccacggtggggtccaggcccagcccaccaccccgtggctgtctcctccaggctccagccgtcctgagggggccctggcagtgtctggagacccccaggctggaggtgaggggtgaactggactgagctcagggttagggttcccccagacccttctgggattcctacttcctgttccctgccgagaggggcaccccaaatcctccagagggctgggatggattagagttgagaatgggacaccctcaaaacccagggggtccttgcaagtccctggcgggcatccctgctgccctcacccgaccccacccccgggagctgggtgaggatggagggtgggggtccagagaagagtgaggggcagtgggggcttttccccaaggccctggggggcatcctcgtgcgtccccacagttcccttgcacaggtgcaggaggctgtcaggagtcagggccgggcatcacggtcccagcgtcgcaggcgggtcggccacagcaggaggctacagagacacagggcagcggccacgcccacgccgcccgtcacagccaccatcgcccagtggtaaaagctcacgcaggccctgcancagagctctgaggggcaagggtgccggacgc

SEQ ID NO: 1454 - DNA, 481 bp, Homo sapiens
  misc_feature (1)...(481): n = A,T,C or G
taaagggaataagnttgcggcccgcaatcttttttttttttttttttttttttagcgggatttggaagtttattcccaaccacaaagattgtcttaactcataggccagcacttcccacaggctgaacttgggggctcccatgtctttttcctgagaaatgctaaccagctgcagtcagagggcgttgttggctatcagtatgtccatctgtctagccctagaagtggcaattcanaatgtctgggtctagctgccccatgagatctccactcaggggcagccactcagccatctgtgctgctaaataactcttgcatgagtggggtggcaaaggggtgcgaagtcttggatgcgcagcaactgctgggtttgctgggcgttgatgcttcgcagctcagtgaggacggccatgatcttcaggaacaggaacctgtgagcaggatatggcccgactacactcaatgtaggccttcagggtga

SEQ ID NO: 1455 - DNA, 574 bp, Homo sapiens
  misc_feature (1)...(574): n = A,T,C or G
nttnnatttaccatagggaacccggccctcgaggccaanaattcggcacgaggcggcacgaggcatgctttcttgaactttatcccatccgaggacatccaaacagnggggntgcatgccctgggactgcagctcaagctgaatacccanagtctctcagctgtttcgccaaggtgctccagaaagatgacagacctcagggcagatcgtcacagagcaccgttgcagctactgcatgtgatcaatgaagacagagacagacatgagcctttcaccccctgctccaggagatctaccaaggacttgtatttancaaggaaaagtccccaccccgctgacaaccgtgnttcctttctatttggattgcncctattatttttgaggggnaaaaaaaatcttgacaccctaaanaaaatttacttggggaaaaaagcattttaaaaaacaaaaaagtttttaagaaacaatggatctatttttattgccatatttggntttattnaaagatacnattttaccanattttacttntttaatatttaaaaaaattacccacnntttanaaaaaaaaaaa

SEQ ID NO: 1456 - DNA, 511 bp, Homo sapiens
  misc_feature (1)...(511): n = A,T,C or G
ccccctggggaaaggatgcaagcctgggcctcaactgcaaatctccccgagcagcggcgtcatagcagacagttcctccaagcgctgaagttcataggagtatgcattgtttatactccggaggtcagccagcaggcccatcagctttgcatacagaaacctttggaggaaggagcagggttaccagggaaataaggcagctgggagtcctgtcctgaggttcctatcccctggaccactcctcaaagaggctaagtctgagcagcagatgctctggagctacatcttggaaaatctcagacatacccaagaagggtctctatcaacactgttccttctttgtgcctagtttttcctgaacccagggatttgaggtcaagtgtaaaagaagttcttggccaaaacgtcaactgtatagaatctgaaggtgaggccttctanatccagttctaaaaggcnggttgngttattctatagaataaagcatccccctcgtancaaacggattcat

SEQ ID NO: 1457 - DNA, 758 bp, Homo sapiens
gcgtccggtttggtggcggccggctgtgcagagacgccatgtaccggctcatgtcagcagtgactgcccgggctgccgcccccgggggcttggcctcaagctgcggacgacgcggggtccatcagcgcgccgggctgccgcctcccgaccctgaggcgtcgcctctggccgagccgccacaggagcagtccctcgccccgtggtctccgcagaccccggcgccgccctgctccaggtgcttcgccagagccatcgagagcagccgcgacctgctgcacaggatcaaggatgaggtgggcgcaccgggcatagtggttggagtttctgtagatggaaaagaagtctggtcagaaggtttaggttatgctgatgttgagaaccgtgtaccatgtaaaccagagacagttatgcgaattgctagcatcagcaaaagtctcaccatggttgctcttgccaaattgtgggaagcagggaaactggatcttgatattccagtacaacattatgttcccgaattcccagaaaaagaatatgaaggtgaaaaggtttctgtcacaacaagattactgatttcccatttaagtggaattcgtcattatgaaaaggacataaaaaaggtgaaagaagagaaagcttataaagccttgaagatgatgaaagagaatgttgcatttgagcaagaaaaagaaggccaaagtaatgaaaagaatgattttactaaatttaaaacagagcaggagaatgaagcccaatgcccg

SEQ ID NO: 1458 - DNA, 638 bp, Homo sapiens
  misc_feature (1)...(638): n = A,T,C or G
gcgtccgccccgcgtccgcccaagtttccagctggagggaaaatgtctcatcacctcgaaaacatgaagattggagacaccattgaattccggggtcccaatgggctactggtctaccagggcaaagggaagtttgccatccgtgcagacaagaagtccaaccccgttgtcaggacggtgaagtctgtaggcatgattgcaggagggacaggcatcaccccaatgctgcaggtgatccgagccgtcctgaaggacccaaacgaccacaccgtgtgctatctgctctttgccaaccagtccgagaaagatatcctgttgcggcctgagctggaggaactgaggaacgaacattctgctcgcttcaagctctggtacacagtggacaaagcccctgatgcctgggactatagccagggcttcgtgaatgaggagatgatcagggaccaccttccaactcctggggaggagccgctgatactgatgtgttggacccccaccaatgatccagtttgcctgtttgccaaacctggagccgtgtgggccatcccaaggagcgatgcttcacctttgatggctggacgctggccagcctgtgcctgctgttacgcactnaccacaaccacctgtncacccttctt

SEQ ID NO: 1459 - DNA, 638 bp, Homo sapiens; identical to SEQ ID NO: 1458
  misc_feature (1)...(638): n = A,T,C or G

SEQ ID NO: 1460 - DNA, 436 bp, Homo sapiens
  misc_feature (1)...(436): n = A,T,C or G
gtcgaccccgcgtccgccttactgaagctcagtcctttattcctgggccttatttaagctaaatatgctttgactcagtgcttgatgccttttctataggtaactatgtccagctcttggcaaaaatcgataatgaattggtggtcagggcttacacccctgtctccagtgatgatgacagaggctttgtggacctaattataaagatctacttcaaaaatgtacacccccaatatcctgaaggtgggaagatgactcagtatttggagaacatgaaaatcggggagaccatcttttttcgagggccaaggggacgcttgttttaccatgggccaggtctggaggggttaatacttgggctcccagctgggaggaagattcctgcaatggttccattgntctcgtacactcctcagattttgagtcacatgggggg

SEQ ID NO: 1461 - DNA, 804 bp, Homo sapiens
  misc_feature (1)...(804): n = A,T,C or G
gcgtccgacaaagaacattcattttacgtcggctgcggtggttggtgtttgatgaagcagacagaatctcgaacccccgtcctgaaaaggacatcacagtgatacttaatgctgtaaatgctgaatgccaaaaacgacagaatgtcttgctatcagccgacactcacagaaggtgtaacgcggctagctgatatcagtttgcatgatccagtcagtatttctgtcctggacaagagccatgaccagttgaacccaaaggacaaagcggtccaggaggtctgtcctccaccagctggcgacaagctggacagctttgcaataccagagagtctcaagcagccatgtgactgtggttcccagcaaactgaggcttgtctgcctagcggccttcatccttcagaaatgcaagtttgaggaagaccagaagatggttgtctttttctcaagttgcgagctggtggagttccactacagcctcttcctacagaccctgctgagcagctcaggggcgccggcatcagggcagttgccatctgcctccatgcgattaaaattcctacggctgcatggcggcatggagcaggagccattaaaaatgatcgtttataaagaccgtgcagcagactggacaaatggatctgtccttttgagggtctgagcactgactccggaacacagctccctgggttcggatatcattccggccctttaccaggaaagaacagcantgtttcaggaattttcacattccagaagaggcgtccttctttgcacgaaatcccatgctgttggcccccaggaaat

SEQ ID NO: 1462 - DNA, 451 bp, Homo sapiens
cgtccgggagcctaatcatcacccccactcgagagctggccattcaaatagacgagggtcctgtcgcatttcacgaagcacttccccgagttcagccagattctttggatcggaggcaggaatcctggagaagatgttgagaggtttaagcaacaagggccgcttggaggacatgttccggaggaaggccgaaggcttggatctggccagctgtgtgcgatccctggatgtcctggtgttggatgaggcagacagacttctggacatggggtttgaggcaagacgcaggaagtggagaacctggtgagagcgggcctccggaaccctgtccgggtctcagtgaaggagaaggggcgtggcagccagcagtgcccagaagacccccttcccgcctggaaaaactactacatggtatgcaaggcagatgagaaatttaatcagctggtccatt

SEQ ID NO: 1463 - DNA, 466 bp, Homo sapiens
  misc_feature (1)...(466): n = A,T,C or G
accccgcgttcggncgaaggagcgcgccatggagcatgtgacagagggctcctgggagtcgctgcctgtgccgctgcacccgcaggtgctgggcgcgctgcgggagctgggcttcccgtacatgacgccggtgcaggttggagccataatcatcacccccactcgagagctggccattcaaatagacgaggtcctgtcgcatttcacgaagcacttccccgagttcagccagattctttggatcggaggcaggaatcctggagaagatgttgagaggtttaagcaacaaggtgggaacatcattgtggccactccaggccgcttggaggacatgttccggaggaaggccgaaggcttggatctggccagctgtgtgcgatccctggatgtcctggtgttggatgaggcagacagacttctggacatggggtttgaggcaagcatcaacaccattctggagtttttg

SEQ ID NO: 1464 - DNA, 471 bp, Homo sapiens
atggagttccgcaatcataagcaggagaaacacctggtcttcttcagcacctgtgcctgtgtggaatactatgggaaggctctggaagtgctggtgaagggcgtgaagattatgtgcattcacggaaagatgaaatataaacgcaataagatcttcatggagttccgcaaattgcaaagtgggattttagtgtgcactgatgtgatggcccggggaattgatattcctgaagtcaactgggttttgcagtatgaccctcccagcaatgcaagatcttgattttgccagccttgctcgaggttttgccctgctgaggatgcccaagatgccagaattgagaggaaagcagtttccagattttgtgcccgtggacgttaataccgacacgattccatttaaagataaaatcagagaaaagccagaggcagaaactcctggagcaacaaagaagagagaaaacagaaaatgaat

SEQ ID NO: 1465 - DNA, 428 bp, Homo sapiens
tactatagggagtcgacccacgcgtccggtgggaacatcattgtggccactccaggccgcttggaggacatgttccggaggaaggccgaaggcttggatctggccagctgtgtgcgatccctggatgtcctggtgttggatgaggcagacagacttctggacatggggtttgaggcaagacgcaggaagtggagaacctggtgagagcgggcctccggaaccctgtccgggtctcagtgaaggagaagggcgtggcagccagcagtgcccagaagaccccctcccgcctggaaaactactacatggtatgcaaggcagatgagaaatttaatcagctggtccattttcttcgcaatcataagcaggagaaacacctggtcttcttcagcacctgtgcctgtgtggaatactatgggaaggctctggaa

SEQ ID NO: 1466 - DNA, 1779 bp, Homo sapiens
  misc_feature (1)...(1779): n = A,T,C or G
tgcgagttcgcccagcggccaccgacgcggcgaaggagcgcgccatggagcatgtgacagagggctcctgggagtcgctgcctgtgccgctgcacccgcaggtgctgggcgcgctgcgggagctgggcttcccgtacatgacgccggtgcagtccgcaaccatccctctgttcatgcgaaacaaagatgtcgctgcagaagcggtcacaggtagtggcaaaacactcgcttttgtcatccccatcctggaaattcttctgagaagagaagagaagttaaaaaagagtcaggttggagccataatcatcacccccactcgagagctggccattcaaatagacgaggtcctgtcgcatttcacgaagcacttccccgagttcagccagattctttggatcggaggcaggaatcctggagaagatgttgagaggtttaagcaacaaggtgggaacatcattgtggccactccaggccgcttggaggacatgttccggaggaaggccgaaggcttggatctggccagctgtgtgcgatccctggatgtcctggtgttggatgaggcagacagacttctggacatggggtttgaggcaagcatcaacaccattctggagtttttgccaaagcagaggagaacaggccttttctctgccactcagacgcaggaagtggagaacctggtgagagcgggcctccggaaccctgtccgggtctcagtgaaggagaagggcgtggcagccagcagtgcccagaagaccccctcccgcctggaaaactactacatggtatgcaaggcagatgagaaatttaatcagctggtccattttcttcgcaatcataagcaggagaaacacctggtcttcttcagcacctgtgcctgtgtggaatactatgggaaggctctggaagtgctggtgaagggcgtgaagattatgtgcattcacggaaagatgaaatataaacgcaataagatcttcatggagttccgcaaattgcaaagtgggattttagtgtgcactgatgtgatggcccggggaattgatattcctgaagtcaactgggttttgcagtatgaccctcccagcaatgcaagtgccttcgtgcatcgctgcggtcgcacagctcgcattggccacgggggcagcgctctggtgttcctcctgcccatggaagagtcatacatcaatttccttgcaattaaccaaaaatgccccctgcaggagatgaagccccagagaaacacagcggaccttctgccaaaactcaagtccatggccctggctgacagagctgtgtttgaaaagggcatgaaagcttttgtgtcatatgtccaagcttatgcaaagcatgaatgcaacctgattttcagattaaaggatcttgattttgccagccttgctcgaggttttgccctgctgaggatgcccaagatgccagaattgagaggaaagcagtttccagattttgtgcccgtggacgttaataccgacacgattccatttaaagataaaatcagagaaaagcagaggcagaaactcctggagcaacaaagaagagagaaaacagaaaatgaagggagaagaaaattcataaaaaataaagcttggtcaaagcagaaggccaaaaaagaaaagaagaaaaaaatgaatgaaaaanaaaaaagggaagagggttctgatattgaagatgaaggacatggaagaacttcttaatgacncaagactcttgaaaaanctttagaaaggcaaattactgaagaaganttgagaaggcntgttg

SEQ ID NO: 1467 - DNA, 451 bp, Homo sapiens; identical to SEQ ID NO: 1462

SEQ ID NO: 1468 - DNA, 466 bp, Homo sapiens; identical to SEQ ID NO: 1463
  misc_feature (1)...(466): n = A,T,C or G

SEQ ID NO: 1469 - DNA, 471 bp, Homo sapiens; identical to SEQ ID NO: 1464

SEQ ID NO: 1470 - DNA, 428 bp, Homo sapiens; identical to SEQ ID NO: 1465

SEQ ID NO: 1471 - DNA, 1779 bp, Homo sapiens; identical to SEQ ID NO: 1466
  misc_feature (1)...(1779): n = A,T,C or G

SEQ ID NO: 1472 - DNA, 374 bp, Homo sapiens
  misc_feature (1)...(374): n = A,T,C or G
gaccccgcgtccgctctgaagcactgggcttcgaacacatgggcctcgatccccggctccttcagacaggtccggtggtagaacaggcagtgagaggccttgttcttgttcctaccaaggagctggcacggcaagcacagtccatgattcagcagctggctacctactgtgctcgggatgtccgagtggccaatgtctcagctgctgaagactcagtctctcagagagctgngctgatggagaagccagatgtggtagtagggaccccatctcgcatattaagccacttgcagcaagacagcctgaaacttcgtgactccctggagcttttggtggggggacgaagctgacctttcttttttcctttggctttg

SEQ ID NO: 1473 - DNA, 479 bp, Homo sapiens
  misc_feature (1)...(479): n = A,T,C or G
ccaccacgcgtccgggactctgaagcactgggcttcgaacacatgggcctcgatccccggctccttcaggctgtcaccgatctgggctggtcgcgacctacgctgatccaggagaaggccatcccactggccctagaagggaaggacctcctggctcgggcccgcacgggctccgggaagacggccgcttatgctattccgatgctgcagctgttgctccataggaaggcggtgggtaacgagagagctgaggggaggaaggaggcaagctccaaaagcctgggaagggcggttcccgtttgtctgaggttttctcttggccctgtacccgtgcaggccggcctgagaacctggtgcttgttgtggcaaacactctgggcttggagttcangttacctggatcccttgtccggcccttgctaccaccaaccttttgcgtaaatcttcgacaaaagcactttcttttctttcttacataa

SEQ ID NO: 1474 - DNA, 548 bp, Homo sapiens
ccccgcgtccgtgaaaacatttgaagagctacgactaaaggaagagttactaaaagggatttatgcaatgggatttaaccgaccatccaaaatccaagagatggccctccccatgatgctcgcacatcctccccagaacctcatagcacagagccagtccggcacaggaaaaaccgctgcctttgtcttagcgatgctaagcagagtgaatgccttggaattgtttccacagtgcctctgcctggctcccacctatgaactggctctgcagaccggccgcgtggttgaaagaatggggaaattctgtgtggatgttgaagtgatgtacgccattcgaggaaaccgaattcctaggggcaccgacgtcaccaaacagattgtcatcggcactcctgggactgtcctagactggtgcttcaagcggaaactgattgacttgacaaagatccgtgtgtttgtcctggatgaagcagatgtgatgattgacacccaaggattctccgatcagagcatccgtatccaaagtgttggaaacaaaagtttttcct

SEQ ID NO: 1475 - DNA, 420 bp, Homo sapiens
tactatagggagtcgcccacgcgtccggtcaaatacgacactattcttgtggaagtgtctggacatgatgcaccaccagcagttctgacttttgaagaagctaatctctgtcagacactgaataacaacattgctaaagctggttatactaagcttactcctgtgcaaaaatacagtattcctatcatacttgcaggacgagatttgatggcttgtgctcaaacagggtctgggaagactgcggcttttctcctaccaattttggctcatatgatgcatgatggaataactgccagtcgttttaaagagttgcaggaaccagagtgtattattgtagcaccaactcgagaattggtcaaccagatttatttggaagccagaaaattttcttttgggacttgtgtaagagctgttgttata

SEQ ID NO: 1476 - DNA, 2238 bp, Homo sapiens
tgtcagttttggtatagaactcggtttctttgttgaagaatatgctggaagcaaaggaagatttcctccaactaaaagaagggaaaagaaatcactctatattgccactattgaaaaaggacatagcttggtgaactccttgattgaaactggaagaattgacagtctgggtctggttgttgtagacgagttgcacatgattggtgaaggaagcccgtggagctacactggaaatgaccctagcaaaaatcctctacactagcaaaacgactcaaattatcggtatgagtgcaacattaaacaatgttgaagacctacaaaagtttcttcaagcagaatattataccagtcaatttagaccagtattaccttaattgagttaaaagaatatctgaaaataaatgatacaatatatgaagttgacagcaaagctgagaatggcatgactttttcacgtcttcttaattataagtattctgataccctaaaaaagatggatcctgatcacttggtagcattggtgacagaagttattcccaattattcctgcttagttttttgtcctagtaagaagaactgtgaaaatgtagcagaaatgatatgcaaatttttaagcaaggaatatctgaaacataaggagaaagaaaaatgtgaggtgattaagaacttgaagaatattggcaatggcaacctgtgtcctgttttaaagcgcactatcccatttggagttgcctatcaccacagtggcttaacaagtgatgaaaggaaactcttggaggaggcctactccacaggagtgctctgtctttttacctgcacatctaccctagcggcaggtgtcaacctaccagctcgaagagttattttaagagctccctatgttgctaaggaatttttaaagaggaatcaatataaacacgatgattggcagagctggtcgtgctggaatagatactattggggagagtatcctcatattgcaagaaaaagacaaacaacaggtattggagttaataactaaaccattggaaaactgttacagccatcttgttcaggaattcaccaagggaatccaaacattatttctctctttgattggtttgaagattgcaacgaatcttgatgacatctatcatttcatgaatggtacattttttggtgttcagcaaaaggttttattgaaagaaaaaagtctctgggaaataactgttgaatcacttagatacctgacagaaaaaggactcctacaaaaagacactatttataagtctgaagaagaggtccaatataattttcatattacaaagttgggacgtgcttcatttaagggaactatagatttagcttattgtgacattctgtacagagacttgaagaaaggtcttcaaggacttgtgcttgaaagccttcttcatctaatctacctaacaaccccctatgatctggtttcacagtgtaaccctgattggatgatatacttcaggcagtttagccaactcagtccagcagaacaaaatgtagctgccattcttggagtctctgaaagctttattgggaagaaagcatcaggccaagccatcggaaagaaggtggacaagaacgttgtcaacaggctatatctgtcttttgttctttataccttgctcaaagagaccaacatttggactgtatctgaaaaatttaatatgcctcgaggatatatacaaaatcttctcactggaactgcctcattctcatcttgtgtgttacatttctgtgaggagcttgaggagttttgggtttacagagcccttttggtagaacttaccaagaagctgacttactgtgtaaaggcagaattaatccctctcatggaagttactggagttttagagggtcgagcaaaacagttatacagtgcaggttacaaaagtctaatgcacttagctaatgcaaatcctgaagtgctcgtaaggacaattgatcatttatcaagacgccaagccaagcaaattgtttcatcagcaaagatgctgttgcatgaaaaagcagaagccctgcaagaagaggtagaagagttactaagattgccttctgatttccctggtgctgtggcttcttccactgacaaagcatgaagctatctgatgagaattttcatatatgaattatttattgtacatgtgtgttattaaagataacttatactttataaatgaaaaaatacatttcagttatacattaaaaaaaaaaaaaagg

SEQ ID NO: 1477 - DNA, 450 bp, Homo sapiens
  misc_feature (1)...(450): n = A,T,C or G
gtccgtgattctgagacaatcctcagactttacttttttctgcaacttgcccacagtgggtatacaaagttgcaaaaaaatacatgaaatccagatatgaacaggttgaccttgttggaaaaatgactcaaaaggctgcaactactgtggaacatttggccntccagtgtcattggtctnnnaggnccccanctnttggngagggncttcaagnntacnnaagggtctnnagggagggggtttttttttttttttttgncccaanaaanaatnntaactgnanntgggccnttnattccncncattaaaaccanaattgcccccngtntttncnttgggggncccttncccccnantcccccaaaagangaaattncccccnttnaangggntttnaaaaananggntttttttntantttnnnggggggcncnnnacnggggggggggg

SEQ ID NO: 1478 - DNA, 2437 bp, Homo sapiens
  misc_feature (1)...(2437): n = A,T,C or G
gtcgaccncgcgtccggcgcgcggcccgaatggcggccgacaagggcccggcggctggacctcggtcgcgagctgccatggcccagtggaggaagaagaaagggctccggaagcgccgaggcgcggcctcccaggcccgcggcagcgactcggaggacggcgagtttgagatccaggcggaagatgacgcccgggcccggaagctgggacctggaagacccctgcccaccttccccacctcggaatgcacctcggatgtggagccggacacccgggagatggtgcgtgcccagaacaagaagaagaagaagtctggaggcttccagtccatgggcctgagctacccggtgttcaaaggcatcatgaagaaggggtacaaggtgccaacacccatccagaggaagaccatcccggtgatcttggatggcaaggacgtggtggccatggcccggacgggcagtggcaagacagcctgcttcctcctcccaatgttcgagcggctcaagacccacagtgcccagaccggggcccgcgccctcatcctctcgccgacccgagagctggccctgcagaccctgaagttcactaaggagctaggcaagttcactggcctcaagactgccctgatcctgggtggagacaggatggaagaccagtttgcagccctgcacgaaaatcccgacataattattgccacgcccggacggttggtgcatgtggctgtggaaatgagcctgaagctgcagagtgtggaatacgtggtgttcgatgaagctgaccggctttttgaaatgggtttcgcagagcagctgcaggagatcatcgcccgcctccccgggggccaccagacggtgctgttctccgccacgctgcccaaactgctggtggaatttgcccgggctggcctcacggagcccgtgctcatccggcttgacgtggataccaagctcaacgagcagctgaagacctccttcttcctcgtgcgggaggacaccaaggctgccgtgctgctccacctgctgcacaacgtggtgcggccccaggaccagaccgtggtgtttgtggccacgaagcaccacgccgagtacctcactgagctgctgacgacccagcgggtgagctgcgcccacatctacagtgccctagacccgacagcccgcaagatcaatctcgccaaattcacgcttggcaagtgctccactctcattgtgactgacctggccgcccgaggcctggacatcccgctgctggacaatgtcatcaactacagcttccccgccaagggcaaactcttcctgcaccgcgtgggccgtgtggctcgggctggccgaagtggcacagcctactccttggtggcccctgatgaaatcccctacctgctggatctgcacctgttcctgggccgctccctcaccctcgcccgacccctcaaggagccctcaggtgtggccggtgtggatggcatgctgggtcgggtgccacagagtgtggtggacgaggaggacagtggtctgcagagcaccctggaggcatcgctggagctacggggcctggcccgcgttgctgataacgcccagcagcagtatgtgcgctcacgcccggcgccctcgcctgagtccatcaagagggccaaggagatggaccttgtggggctgggcctgcaccccctcttcagctcgcgttttgaggaggaggagctgcagcggctgaggctggtggacagcataaagaactaccgctcccgggcgactatctttgagatcaacgcctccagccgagacctgtgcagccaggtgatgcgcgccaagcggcagaaggaccgcaaggccatcgcccgcttccagcagggacagcaggggcggcaggagcagcaggagggcccagtgggcccagccccgagccgcccagcactgcaggagaagcagcctgagaaggaggaggaggaggaggcgggagagagtgtggaggacattttctcagaggtcgtgggccggaagcggcagcggtcaggacccaacaggggagccaagaggcggagggaggaggcccggcagcgggaccaggaattctacatcccctaccggcccaaggactttgacagcgagcggggcctgagcatcagcggggaagggggagcctttgagcagcaggcagctggcgctgtcctggacttgatgggggatgaagcccagaacctgacgaggggccggcagcagctcaagtgggaccgtaagaagaagcggtttgtgggacagtcaggacaggaagacaagaagaagattaagacagagagcggccgctacatcagcagctcctacaagcgagacctctatcagaagtggaaacagaaacagaaaattgatgatcgtgactcagagcctgagtgcctcagggtttggcaatggaatttttaatgtaataaatctttattgagcac

SEQ ID NO: 1479 - DNA, 2437 bp, Homo sapiens; identical to SEQ ID NO: 1478
  misc_feature (1)...(2437): n = A,T,C or G

SEQ ID NO: 1480 - DNA, 486 bp, Homo sapiens
  misc_feature (1)...(486): n = A,T,C or G
agtccagccagattctttggatcggaggcaggaatcctggagaagatgttganaggtttaagcaacaanggtgagtttgctcgngtctgcttgnttctttgcttgcttttggcattgaacctaagaatcgatgtgtgatctaacctaactgtgggtccccctttcagcancctcctacccctncaaaaaaggnttttttcttacangccagntttcccattgtgctttagctggctncttcccataaggccctgatgaagaactttcacaaacttcaangtttcttacagaaggtnaagnngaacnacnttgaaagtataaattgatttggtcaggnggcctggggnggantggtttaggaanctgggcccaancaancttgcctttngaantacttnaagcttcccaancttggtnngttcgccctngnaaanggacctcnngcttcnattaattggncagggttntntgaaantttttttaaaa

SEQ ID NO: 1481 - DNA, 905 bp, Homo sapiens
  misc_feature (1)...(905): n = A,T,C or G
acccactcgaccccgcacccgttcccgggcccagcagtctgctcaccgggctcgctgctgcaccacgcgtcacccacgcagaccatggcagccgccgacggttcgctcttcgacaaccccaggacgttctccagacgtcccccagcccaggcgagtcggcaagcaaaggctacgaaaagaaaataccaagcgtccagtgaggctcccccagcgaaacggaggaacgaaacttcatttctcccagccaagaaaactagtgttaaagaaactcagaggacttttaaggggaacgcacaaaaaatgttttctccaaagaagcattcggttagcacaagtgatagaaaccaggaggagagacagtgcattaagacttcatcactgtttaaaaacaaccctgacattccagaactccacagacctgtggtaaagcaggtgcaagaaaaagtgtttacttcagctgcttttcatgagctgggcctccacccacatttaatttccacaataaatacggtcttaaaaatgtctagtatgaccagtgttcagaagcaaagtattcctgtgttgctggaaggcagagatgctctcgtgagatcccagacgggctcaggtaaaactcttgcctattgcatccctgtggtccagtcccttcaagcaatggagtcaaaaatacagcgcagtgatggcccctatgccctggtgctcgtgccaacgagagagctagctctacaaagctttgacactgtccagaaactgcttaagcctttcacctggattgtgcctggagtgttaatgggaggagagaagaanaaaatcaaaaaaaggccagactccgcaaaggaataaatatccttatctcaactcctggaccctggtggatcatataaaatccacaaagaacattcatt

SEQ ID NO: 1482 - DNA, 3032 bp, Homo sapiens
  misc_feature (1)...(3032): n = A,T,C or G
cgcggcggccgcccaggtacagcggcggtttctgaggttcttcactcgcgactgacggagctgcggtggcgtctccacacgcaaccatgaagttgaaggacacaaaatcaaggccaaagcagtcaagctgtggcaaatttcagacaaagggaatcaaagttgtgggaaaatggaaggaagtgaagattgacccaaatatgtttgcagatggacagatggatgacttggtgtgctttgaggaattgacagattaccagttggtctcccctgccaagaatccctccagtctcttctcaaaggaagcacccaagagaaaggcacaagctgtttcagaagaagaggaggaggaggagggaaagtctagctcaccaaagaaaaagatcaagttgaagaaaagtaaaaatgtagcaactgaaggaaccagtacccagaaagaatttgaagtgaaagatcctgagctggaggcccagggagatgacatggtttgtgatgatccggaggctggggagatgacatcagaaaacctggtccaaactgctccaaaaaagaagaaaaataaagggaaaaaagggttggagccttctcagagcactgctgccaaggtgcccaaaaaagcgaagacatggattcctgaagttcatgatcagaaagcagatgtgtcagcttggaaggacctgtttgttcccaggccggttctccgagcactcagctttctaggcttctctgcacccacaccaatccaagccctgaccttggcacctgccatccgtgacaaactggacatccttggggctgctgagacaggaagtgggaaaactcttgcctttgccatcccaatgattcatgcggtgttgcagtggcagaagaggaatgctgcccctcctccaagtaacaccgaagcaccacctggagagaccagaactgaggccggagctgagactagatcaccaggcaaggctgaagctgagtctgatgcattgcctgacgatactgtaattgagagtgaagcactgcccagtgatattgcagccgaggccagagccaagactggaggcactgtctcagaccaggcgttgctctttggtgacgatgatgctggtgaagggccttcttccctgatcagggagaaacctgttcccaaacagaatgagaatgaggaggaaaatcttgataaagagcagactggaaatctaaaacaggagttggatgacaaaagcgccacctgtaaggcatatccaaagcgtcctctgcttggactggttctgactcccactcgagagctggccgtccaggtcaaacagcacattgatgctgtggccaggtttacaggaattaaaactgctattttggttggtggaatgtccacgcagaaacagcagaggatgctgaaccgtcgtcctgagattgtggttgctactccaggccggctgtgggaattaattaaagaaaagcattatcatttgaggaaccttcggcagctcaggtgcctggtagtggatgaggctgaccggatggttgagaaaggccattttgctgagctctcacagctgctagagatgctcaatgactcccaatacaacccaaagagacaaacgcttgttttttctgccacactcaccctggtgcatcaggctcctgctcgaatccttcataagaagcacaccaagaaaatggataaaacagccaaacttgacctccttatgcagaaaattggcatgaggggcaagcccaaggtcattgacctcacaaggaatgaggccacggtggagacgctaacagagaccaagatccattgtgagactgatgagaaagacttctacttgtactacttcctgatgcagtatccaggccgcagcttagtgtttgccaacagtatctcctgcatcaaacgcctctctgggctcctcaaagtccttgatatcatgcccttgaccctgcatgcctgtatgcaccagaagcagaggctcagaaacctggagcagtttgcccgtctggaagactgtgttctcttggcaacagatgtggcagctcggggtctggatattcctaaagtccagcatgtcatccattaccaggtcccacgtacctcggagatttatgtccaccgaagtggtcgaactgctcgagctaccaatgaaggcctcagtctgatgctcattgggcctgaggatgtgatcaactttaagaagatttacaaaacgctcaagaaagatgaggatatcccactgttccccgtgcagacaaaatacatggatgtggtcaaggagcgaatccgtttagctcgacagattgagaaatctgagtatcggaacttccaggcttgcctgcacaactcttggattgagcaggcagcagctgccctggagattgagctggaagaagacatgtataagggaggaaaagctgaccagcaagaagaacgtcggagacaaaagcagatgaaggttctgaagaaggagctgcgccacctgctgtcccagccactgtttacggagagccagaaaaccaagtatcccactcagtctggcaagccgcccctgcttgtgtctgccccaagtaagagcgagtctgctttgagctgtctctccaagcagaagaagaagaagacaaagaagccgaaggagccacagccggaacagccacagccaagtacaagtgcaaattaactgccgtggtcaagtgtgtcagtgactgcacattggtttctgttctctggctatttgcaaaacctctcccacccttgtgtttcactccaccaccaaccccaggtaaaaaagtctccctctcttccactcacacccatagcgggagagacctcatgcagatttgcattgttttggagtaagaattcaatgcagcagcttaatttttctgtattgcagtgtttataggcttcttgtgtgttaaacttgatttcataaattaaaaacaatggtcagaaaaaaaaaaaaaaaaaaaaaaaaaaaaaaaaaaaaaannnnnnnnnnnnnnnnnnnnnnnnnnnnnnnnnnnnnnnnnnnnnnnnnnnnccc

SEQ ID NO: 1483 - DNA, 3032 bp, Homo sapiens; identical to SEQ ID NO: 1482
  misc_feature (1)...(3032): n = A,T,C or G

SEQ ID NO: 1484 - DNA, 1114 bp, Homo sapiens
  misc_feature (1)...(1114): n = A,T,C or G
cacgcacgcggccagaaagatccaaaacaagtggctgcggccgtcgcccaggagtcatcggacgccagaatctggccgggttctgagcttgttccgcctccctcccccgggaatggcgctatccgggtcgaccccggccccgtgctgggaggaggatgagtgcctggactactacgggatgctgtcgcttcaccgtatgttcgaggtggtgggcgggcaactgaccgagtgcgagctggagctcctggcctttctgctggatgaggctcctggcgccgccggaggcttagcccgggcccgcagcggcctagagctcctgctggagctggagcgccgcgggcagtgcgacgagagcaacctgcggctgctggggcaactcctgcgcgtgctggcccgccacgacctgctgccgcacctggcgcgcaagcggcgccggccagtgtctccagaacgctatagctatggcacctccagctcttcaaagaggacagagggtagctgccgtcgccgtcggcagtcaagcagttctgcaaattctcagcagggtcagtgggagacaggctcccccccaaccaagcggcagcggcggagtcggggccggcccagtggtggtgccagacggcggcggagaggggccccagccgcaccccagcagcagtcagagcccgccagaccttcctctgaaggcaaagtgacctgtgacatccggctccgggttcgagcagagtactgcgagcatgggccagccttggagcagggcgtggcatcccggcggccccaggcgctggcgcggcagctggacgtgtttgggcaggccacccgcagtgctgcgctcaagggacctgggctctgtggtttgtgacatcaagttctcagagctctcctatctggacgccttctggggcgactacctcgagtggcgccctgctgcaggccctgcgggcgtgttcctgactgagccctgcgagaggctgttggccgcgagtctttcgcctgctggtcantgtggatgaggctgactatgaggctggccgccgccgcctgttgctgatgaaagaggaacgccacagagctctatcagactgcagatgatcactcagttcgcactctctga

SEQ ID NO: 1485 - DNA, 323 bp, Homo sapiens
  misc_feature (1)...(323): n = A,T,C or G
tngtnaaaaggtcncanantncgcnctgcaaggcggatggagctgctttctgttgcccaanagcatgannngggctggtcatgatccncanagtnctttctncttcatcnccttgtgctcctgnccctgggagctgtggatcccanatccagatgganagcccaccttnctggcaggatgcaccnntcccctgngcctgaagaataacancatccctgacaancagatcacggcctcctncaactacnngaccnggggcttgcatctcttcanctgnaacccctcctatgcncggctggacaaacanggcaacttcaacncct

SEQ ID NO: 1486 - DNA, 429 bp, Homo sapiens
  misc_feature (1)...(429): n = A,T,C or G
ggacacccaagaagacngcntntggacctttgcaggaaacatgaatgctgacagcgtggtgcaccacaagctattgcactcagtgagagcccgatttgttcgctttgtgcccctggaatggaatcccagtgggaagattggcatgagagtcnagggctacngatgttcctataaatcagacgttgctgactttgatggccgaagctcacttctgtacaggttcaatcagaagttgatgagtactctcaaagatgtgatctncctgangttcaanagcatgcaaggagatggggtcctgttncatggagaaggtcagcgtggagaccacatcaccttggaactccanaaggggaggctcgccctacacctaaatttgggtgacancaaagcgcggctcagcaagcagnttgccctctgncaccctggggc

SEQ ID NO: 1487 - DNA, 183 bp, Homo sapiens
  misc_feature (1)...(183): n = A,T,C or G
ccagcagntacaagacctggggcttgcatnttttnanntggaacccctnctatgcacggctgggcaggcagggnaacttnaacgnctgggttgnnnggagctacngnaacnatcagtggctgcaggtggacctgggctnctagaangaggtgacaggcatnatnacccagggggcccgtnact

SEQ ID NO: 1488 - DNA, 476 bp, Homo sapiens
  misc_feature (1)...(476): n = A,T,C or G
ccggcttctcagagctgtccagcagcccggcccggggttttcaaggcttaatcgaagagatggagctggtggctggaccccacttgtgtcaaataaataccaatggctgcaaattgaccttggagagagaatggaggtcactgctgtcgccacccaaggaggatatgggagctctgactgggtgaccagctacctcctgatgttcagtgatggtgggagaaactggaagcagtatcgccgagaagaaagcatctgggtatgtttctaataacaataattgctacctattgctgcaaacctattagaaaaacagaattttaagaattactttgaaaaaaatgttctaagtgaaagtaagatacctatttcattgaaagcattgaaagagaatcttataccattaaatagtgtggaagttaaaaaataatacaaatcatatataatttattttttcttggnttgcttaataaaagtaa

SEQ ID NO: 1489 - DNA, 524 bp, Homo sapiens
  misc_feature (1)...(524): n = A,T,C or G
cccgtccgcacactaccattatctctgtttgccatgttggtgctcatgcgtctctgccctccatagacagactatttaatcagcaggcagatcaacaggccaaaatttccaccataactgcaaacttgaatgcggatgaatggattacaacatggtcaaaccttgcaatgagaggcattataatgtatggtgctataattgatagtgattaccggggagagttaaaggtcattttatacaataccactccagattcttttgctataaaaccgcanatgcaggttgctcaattgttagtggtatcttgtcaacaacccccgaggaaatttccaccccaatagaaacaacatatagaacggaacattcaggtccaccagagtgggcaacttaaatcctggagctaaaatatgggtacagtgtccatcagatcctgcccctaagactgctgaccttgtagctattggagcagaatatgaaggcacagtacaatttcctaaagatgaaaaacagtatcatgttcccct

SEQ ID NO: 1490 - DNA, 259 bp, Homo sapiens
  misc_feature (1)...(259): n = A,T,C or G
gatcgcgagcggcgccctttttttttttttttttgcattttcactgaagcatttattatgcaaaatangaaggctttagcatgccantataaattaaaacagttcnaaaaaaagcagagcanagagcgttttccatncatggcctgtgccctgtattgacncagnantatcctagtacattgacgggnntttcctgtcctgccactgtccgntgggcagttataggtcccaagtgttgtatgtcctgctgccgatgcct

SEQ ID NO: 1491 - DNA, 585 bp, Homo sapiens
  misc_feature (1)...(585): n = A,T,C or G
ccccgcgtccgcggacgcgtgggtcaagggattgttcctgaaacattcacgctgtccaatctcccacatttcanaattggtgggagtgtgcatttgattgttaataaccagctgggttacaccactccagctgaaagaggaaggtcttctatatactgcagtgatattgggaaagcttgtgggctgtgccatcatccatgtcaatggagacagcccanaggaagtggtccgtgccacacgactggcttttgaataccaacgccagttccgcaaggatgtgattattgatctgttgtgctacaggcagtggggccacaatgagctggatgaagccattctacaccaaccccatcatgtacaaaatcctcctactatgccaagttgaatgatcacttaaataacatggcccactacaaggccccctgccctgaacctgcaggcccactggcagggcctggctcagccagaagcgcaaatcaccacctggagnacaggngngcccctncacctnctgcggtttgntggcatgaagtctgtaagaggtgccaagagagctgtacttgcacagtcacctgctgaagacac

SEQ ID NO: 1492 - DNA, 1936 bp, Homo sapiens
  misc_feature (1)...(1936): n = A,T,C or G
gagatggatgagcccatgttcacgcagccgctcatgtacaagcagatccgcaagcagaagcctgtgttacagaagtacgctgagctgctggtgtcgcagggtgtggtcaaccagcctgagtatgaggaggaaatttccaagtatgataagatctgtgaggaagcttttgccagatctaaagatgagaagatcttgcacattaagcactggctggactctccctggcctggcttcttcaccctggacgggcagcccaggagcatgtcctgcccctccacgggtctgacggaggatattctgacacacatcgggaatgtggctagttctgtgcctgtggaaaactttactattcatggagggctgagccggatcttgaagactcgtggggaaatggtgaagaaccggactgtggactgggctctagcggagtacatggcgtttggctcgctcctgaaggagggcatccacattcggctgagcggccaggacgtggagcggggcacattcagccaccgccaccatgtgctccatgaccagaatgtggacaagagaacctgcatccccatgaaccatctctggcccaatcaggccccctatactgtgtgcaacagctcactgtctgagtacggcgtgctgggctttgagctgggcttcgccatggccagtcctaatgccctggtcctctgggaagcccaatttggtgacttccacaacacggcccagtgtatcatcgaccagttcatctgcccgggacaagccaagtgggtgcggcagaatggcatcgtgttgctgctgccccatggcatggagggcatgggtccagaacattcctccgcccgcccagagcggttcttgcagatgtgcaacgatgacccagatgtcctgccagaccttaaagaagccaacttcgacatcaatcagctatatgactgcaattgggttgttgtcaactgctccactcctggcaacttcttccacgtgctacgacgccagatcctgctgccattccggaagccgttaattatcttcacccccaaatccctgttgcgccaccccgaggccagatccagctttgatgagatgcttccaggaacccacttccagcgggtgatcccagaagatggccctgcagctcagaacccagaaaatgtcaaaaggcttctcttctgcaccggcaaagtgtattatgacctcacccgggagcgcaaagcacgcgacatggtggggcaggtggccatcacaaggattgagcagctgtcgccattcccctttgacctcctgctgaaggaggtgcagaagtaccccaatgctgagctggcctggtgccaggaggagcacaagaaccaaggctactatgactacgtgaagccaagacttcggaccaccatcagccgcgccaagcccgtctggtatgccggccgggacccagcggctgctccagccaccggcaacaagaagacccacctgacggagctgcagcgcctcctggacacggccttcgacctggacgtcttcaagaacttctcgtagatgctgcctagggttgcttgggccactgccctctccacacccatgactgccccttgcttctcaactaaagaatagtgcctcagcgctgcccacaccaccgccctcctcgctgtgccaccacccctccctctgctctcataggagttaggctgtcgtccccctccagtgcttggctgccccacaggccacacgctgcccaggctctgctgacttctgagcagttttccaggaggccggggggagcaggaggaaggaaaggtagcccccgagggatgtccttggggaggggtcagctctggccacaatcctccccaccagtctcacccactaggataggaactgggccttgtgtgctggcttccgctgttaccagcaagnaanaggctcctgtatttgaaataggata

SEQ ID NO: 1493 - DNA, 1355 bp, Homo sapiens
  misc_feature (1)...(1355): n = A,T,C or G
gcgtccggcacttcataatcgaattatgcccacagtggttcnccctcccaaacaactgcttcctgaatctacccctgcaggaaaccaagaaatggagctgtttgaacttccagctacttatgagataggaattgttcgccagttcccattttcttctgctttgcaacgtatgagtgtggttgccagggtgctgggggataggaaaatggacgcctacatgaaaggagcgcccgaggccattgccggtctctgtaaacctgaaacagttcctgtcgattttcaaaacgttttggaagacttcactaaacagggcttccgtgtgattgctcttgcacacagaaaattggagtcaaaactgacatggcataaagtacagaatattagcagagatgcaattgagaacaacatggattttatgggattaattataatgcagaacaaattaaagcaagaaacccctgcagtacttgaagatttgcataaagccaacattcgcaccgtcatggtcacaggtgacagtatgttgactgctgtctctgtggccagagattgtggaatgattctacctcaggataaagtgattattgctgaagcattacctccaaaggatgggaaagttgccaaaataaattggcattatgcagactccctcacgcagtgcagtcatccatcagcaattgacccagaggctattccggttaaattggtccatgatagcttagaggatcttcaaatgactcgttatcattttgcaatgaatggaaaatcattctcagtgatactggagcattttcaagaccttgttcctaagttgatgttgcatggcaccgtgtttgcccgtatggcacctgatcagaagacacagtttgatagaagcattgcaaaatgttgattattttgttgggatgtgtggtgatggcgcaaatgattgtggtgctttgaagagggcacacggaggcatttccttatcggagctcgaagcttcagtggcatctccctttacctctaagactcctagtatttcctgtgtgccaaaccttatcagggaaggccgtgctgctttaataacttccttctgtgtgtttaaattcatggcattgtacagcattatccagtacttcaagtgttactctgctgtattctatcttaagtaacctaggagacttccagtttctcttcattgatctggcaatcattttggtagtggtatttacaatgagtttaaatcctgcctggaaagaacttgtggcacaaagaccaccttcgggtcttatatctggggcccttctcttctccgttttgtctcaaattatcatctgcattggatttcaatctttgggttttttttgggtcaa

SEQ ID NO: 1494 - DNA, 434 bp, Homo sapiens
  misc_feature (1)...(434): n = A,T,C or G
cgccccgcgtccggtactgacaaaggggatgcatgcctacagaaaactgctttatggagtaaatgaaattgctgtaaaagtgccttctgtttttaagcttctaattaaagaggttctcaacccattttacattttccagctgttcagtgttatactgtggagcactgatgaatactattactatgctctagctattgtggttatgtccatagtatcaatcgtaagctcactatattccattaagaaagcaatatgttatgttgcatgacatggtggcaactcatagtaccgtaagagtttcantctgtagagtaaatgaaaaaatanaagaaatcttttctaccgaccttgtgccaggagatgtcatggtcattccattaaatgggacaataatgccttgtgatgctgtgcttattaatgggtacctgcattgt

SEQ ID NO: 1495 - DNA, 3639 bp, Homo sapiens
atggacactgaggagtacgaccccagcaaagcgacctttgtgaaggtggtgccaacccccaacaatggctccacggagctcgtggccctgcaccgcaatgagggcgaagacgggcttgaggtgctgtccttcgaattccagaagatcaagtattcctacgatgccctggagaagaagcagtttctccccgtggcctttcctgtgggaaacgccttctcatactatcagagcaacagaggcttccaggaagactcagagatccgagcagctgagaagaaatttgggagcaacaaggccgagatggtggtgcctgacttctcggagcttttcaaggagagagccacagcccccttctttgtatttcaggtgttctgtgtggggctctggtgcctggatgagtactggtactacagcgtctttacgctatccatgctggtggcgttcgaggcctcgctggtgcagcagcagatgcggaacatgtcggagatccggaagatgggcaacaagccccacatgatccaggtctaccgaagccgcaagtggaggcccattgccagtgatgagatcgtaccaggggacatcgtctccatcggccgctccccacaggagaacctggtgccatgtgacgtgcttctgctgcgaggccgctgcatcgtagacgaggccatgctcacgggggagtccgtgccacagatgaaggagcccatcgaagacctcagcccagaccgggtgctggacctccaggctgattcccggctgcacgtcatcttcgggggcaccaaggtggtgcagcacatccccccacagaaagccaccacgggcctgaagccggttgacagcgggtgcgtggcctacgtcctgcggaccggattcaacacatcccagggcaagctgctgcgcaccatcctcttcggggtcaagagggtgactgcgaacaacctggagaccttcatcttcatcctcttcctcctggtgtttgccatcgctgcagctgcctatgtatggattgaaggtaccaaggaccccagccggaaccgctacaagctgtttctggagtgcaccctgatcctcacctcggtcgtgcctcctgagctgcccatcgagctgtccctggccgtcaacacctccctcatcgccctggccaagctctacatgtactgcacagagcccttccggatcccctttgctggcaaggtcgaggtgtgctgctttgacaagacggggacgttgaccagtgacagcctggtggtgcgcggtgtggccgggctgagagacgggaaggaggtgaccccagtgtccagcatccctgtagaaacacaccgggccctggcctcgtgccactcgctcatgcagctggacgacggcaccctcgtgggtgaccctctagagaaggccatgctgacggccgtggactggacgctgaccaaagatgagaaagtattcccccgaagtattaaaactcaggggctgaaaattcaccagcgctttcattttgccagtgccctgaagcgaatgtccgtgcttgcctcgtatgagaagctgggctccaccgacctctgctacatcgcggccgtgaagggggcccccgaaactctgcactccatgttctcccagtgcccgcccgactaccaccacatccacaccgagatctcccgggaaggagcccgcgtcctggcgctggggtacaaggagctgggacacctcactcaccagcaggcccgggaggtcaagcgggaggccctggagtgcagcctcaagttcgtcggcttcattgtggtctcctgcccgctcaaggctgactccaaggccgtgatccgggagatccagaatgcgtcccaccgggtggtcatgatcacgggagacaacccgctcactgcatgccacgtggcccaggagctgcacttcattgaaaaggcccacacgctgatcctgcagcctccctccgagaaaggtgaggccctagcctggcccacagtggggaagggggaccctgagtccaagaacagctcccatcgcaacagcccacctgtgtaccaggcctcagcagcacagtgtcttcaaatgcctggcaccactaatcacagccctggcccactgggcacctcggacagcattgtcatcctcatttcacaccctctttggcccggcaagctgcccatgtaccgagtgctcccttcccgagcacagggactgctggcatcctcagccacagttgatggcagtttgcccagtgctcagcctgaccagaccccaggcggagcgctccgccggcagtgcgagtggcgctccattgacggcagcatcgtgctgcccctggcccggggctccccaaaggcactggccctggagtacgcactgtgcctcacaggcgacggcttggcccacctgcaggccaccgacccccagcagctgctccgcctcatcccccatgtgcaggtgttcgcccgtgtggctcccaagcagaaggagtttgtcatcaccagcctgaaggagctgggctacgtgaccctcatgtgtggggatggcaccaacgacgtgggcgccctgaagcatgctgacgtgggtgtggcgctcttggccaatgcccctgagcgggttgtcgagcggcgacggcggccccgggacagcccaaccctgagcaacagtggcatcagagccacctccaggacagccaagcagcggtcggggctccctccctccgaggagcagccaacctcccagagggaccgcctgagccaggtgctgcgagacctcgaggacgagagtacgcccattgtgaaactgggggatgccagcatcgcagcacccttcacctccaagctctcatccatccagtgcatctgccacgtgatcaagcagggccgctgcacgctggtgaccacgctacagatgttcaagatcctggcgctcaatgccctcatcctggcctacagccagagcgtcctctacctggagggagtcaagttcagtgacttccaggccaccctacaggggctgctgctggccggctgcttcctcttcatctcccgttccaaggaacggcccctgcccaacatcttcaacctgtacaccatcctcaccgtcatgctccagttctttgtgcacttcctgagccttgtctacctgtaccgtgaggcccaggcccggagccccgagaagcaggagcagttcgtggacttgtacaaggagtttgagccaagcctggtcaacagcaccgtctacatcatggccatggccatgcagatggccaccttcgccatcaattacaaaggcccgcccttcatggagagcctgcccgagaacaagcccctggtgtggagtctggcagtttcactcctggccatcattggcctgctcctcggctcctcgcccgacttcaacagccagtttggcctcgtggacatccctgtggaggtcagtggccctgtggaggtgaccctggggctcagcttgatgggtccctcctatggcagtgaccctgagctgggctgcaggtctccagctcaccatccctccctgccccgacagttcaagctggtcattgcccaggtcctgctcctggacttctgcctggcgctcctggccgaccgcgtcctgcagttcttcctggggaccccgaagctgaaagtgccttcctga

SEQ ID NO: 1496 - DNA, 1011 bp, Homo sapiens
cgtccggcggcagcggcggcggtgggcaacgcggtgccctgcggggcccggccttgcggggtccggcctgacgggcagcccaagcccgggccgcagccgcgcgcgctccttgccgccgggccggcgctcatagcgaacggtgacgagctggtggctgccgtgtggccgtaccggcggttggcgctgttgcggcgcctcacggtgctgccattcgccgggctgctttacccggcctggttgggtgccgcagccgctggctgctggggctggggcagcagttgggtgcagatccccgaagctgcgctgctcgtgcttgccaccatctgcctcgcgcacgcgctcactgtcctctcggggcattggtctgtgcacgcgcattgcgcgctcacctgcaccccggagtacgaccccagcaaagcgacctttgtgaaggtggtgccaacccccaacaatggctccacggagctcgtggccctgcaccgcaatgagggcgaagacgggcttgaggtgctgtccttgaattccaagaagaatcaaagtattcctacgatgccctggagaagaagcagtttctccccgtggcctttcctgtgggaaacgccttctcatactatcagagcaacagaggcttccaggaagactcagagatccgagcagctgagaagaaatttgggagcaacaaggccgagatggtggtgcctgacttctcggagcttttcaaggagagagccacagcccccttctttgtatttcaggtgttctgtgtggggctctggtgcctggatgagtactggtactacagcgtctttacgctatccatgctggtggcgttcgaggcctcgctggtgcagcagcagatgcggaacatgtcggagatccggaagatgggcaacaagccccacatgatccaggtctaccgaagccgcaagtggaggcccattgccagtgatgagatcgtaccaggggacatcgtctccatcggccgctccccacaggagaacctggtgccat

SEQ ID NO: 1497 - DNA, 2846 bp, Homo sapiens
cgcggacgcgtgggcgtagacgaggccattcccacgggggagtccgtgccacagatgaaggagcccatcgaagacctcagcccagaccgggtgctggacctccaggctgattcccggctgcacgtcatcttcgggggcaccaaggtggtgcagcacatccccccacagaaagccaccacgggcctgaagccggttgacagcgggtgcgtggcctacgtcctgcggaccggattcaacacatcccagggcaagctgctgcgcaccatcctcttcggggtcaagagggtgactgcgaacaacctggagaccttcatcttcatcctcttcctcctggtgtttgccatcgctgcagctgcctatgtatggattgaaggtaccaaggaccccagccggaaccgctacaagctgtttctggagtgcaccctgatcctcacctcggtcgtgcctcctgagctgcccatcgagctgtccctggccgtcaacacctccctcatcgccctggccaagctctacatgtactgcacagagcccttccggatcccctttgctggcaaggtcgaggtgtgctgctttgacaagacggggacgttgaccagtgacagcctggtggtgcgcggtgtggccgccctcatacacgggaaggaggtgaccccagtgtccagcatccctgtagaaacacaccgggccctggcctcgtgccactcgctcatgcagctggacgacggcaccctcgtgggtgaccctctagagaaggccatgctgacggccgtggactggacgctgaccaaagatgagaaagtattcccccgaagtattaaaactcaggggctgaaaattcaccagcgctttcattttgccagtgccctgaagcgaatgtccgtgcttgcctcgtatgagaagctgggctccaccgacctctgctacatcgcggccgtgaagggggcccccgaaactctgcactccatgttctcccagtgcccgcccgactaccaccacatccacaccgagatctcccgggaaggagcccgcgtcctggcgctggggtacaaggagctgggacacctcactcaccagcaggcccgggaggtcaagcgggaggccctggagtgcagcctcaagttcgtcggcttcattgtggtctcctgcccgctcaaggctgactccaaggccgtgatccgggagatccagaatgcgtcccaccgggtggtcatgatcacgggagacaacccgctcactgcatgccacgtggcccaggagctgcacttcattgaaaaggcccacacgctgatcctgcagcctccctccgagaaaggccggcagtgcgagtggcgctccattgacggcagcatcgtgctgcccctggcccggggctccccaaaggcactggccctggagtacgcactgtgcctcacaggcgacggcttggcccacctgcaggccaccgacccccagcagctgctccgcctcatcccccatgtgcaggtgttcgcccgtgtggctcccaagcagaaggagtttgtcatcaccagcctgaaggagctgggctacgtgaccctcatgtgtggggatggcaccaacgacgtgggcgccctgaagcatgctgacgtgggtgtggcgctcttggccaatgcccctgagcgggttgtcgagcggcgacggcggccccgggacagcccaaccctgagcaacagtggcatcagagccacctccaggacagccaagcagcggtcggggctccctccctccgaggagcacgccaacctcccagagggaccgcctgagccaggtgctgcgagacctcgaggacgagagtacgcccattgtgaaactgggggatgccagcatcgcagcacccttcacctccaagctctcatccatccagtgcatctgccacgtgatcaagcagggccgctgcacgctggtgaccacgctacagatgttcaagatcctggcgctcaatgccctcatcctggcctacagccagagcgtcctctacctggagggagtcaagttcagtgacttccaggccaccctacaggggctgctgctggccggctgcttcctcttcatctcccgttccaagcccctcaagaccctctcccgagaacggcccctgcccaacatcttcaacctgtacaccatcctcaccgtcatgctccagttctttgtgcacttcctgagccttgtctacctgtaccgtgaggcccaggcccggagccccgagaagcaggagcagttcgtggacttgtacaaggagtttgagccaagcctggtcaacagcaccgtctacatcatggccatggccatgcagatggccaccttcgccatcaattacaaaggcccgcccttcatggagagcctgcccgagaacaagcccctggtgtggagtctggcagtttcactcctggccatcattggcctgctcctcggctcctcgcccgacttcaacagccagtttggcctcgtggacatccctgtggagttcaagctggtcattgcccaggtcctgctcctggacttctgcctggcgctcctggccgaccgcgtcctgcagttcttcctggggaccccgaagctgaaagtgccttcctgagatggcagtgctggtacccactgcccaccctggctgccgctgggcgggaaccccaacagggccccgggagggaaccctgcccccaaccccccacagcaaggctgtacagtctcgcccttggaagactgagctgggacccccacagccatccgctggcttggccagcagaaccagccccaagccagcacctttggtaaataaagcagcatctgagattttaaaaaaaaaaaaaaaaagggcgaaaaaaaaaaaa

SEQ ID NO: 1498 - DNA, 564 bp, Homo sapiens
  misc_feature (1)...(564): n = A,T,C or G
cgtccggctccagagaggagagactggctggtgctggggtccgagtggagggagggtgcttctgagcccggtcagccaagcccccagccctaaccctaggtgctgcccgcaggccggcagtgcgagtggcgctccattgacggcagcatcgtgctgcccctggcccggggctccccaaaggcactggccctggagtacgcactgtgcctcacaggcgacggcttggcccacctgcaggccaccgacccccagcagctgctccgcctcatcccccatgtgcaggtgttcgcccgtgtggctcccaagcagaaggagtttgtcatcaccagcctgaaggagctgggctacgtgaccctcatgtgtggggatggcaccaacgacgtgggcgccctgaagcatgcttgacgtgggtgtggcgctcttggccaatgcccctgagcgggttgtcnagcggcgacggcggnccnggnacagcaaccctgancaacagtggcatcaagagccacctccaggacagccaagcannggnnggggctccctccctncgaggagcagccaacctcc

SEQ ID NO: 1499 - DNA, 255 bp, Homo sapiens
  misc_feature (1)...(255): n = A,T,C or G
tgaccacgcgtccgcagctgctggctaccgtgtcgtggccctggccagcaagccactgcccactgtgcccagcctggaggcagcccagcaactgacgagggacactgtggaaggagacctgagcctcctggggctgctggtcatgaggaacctactgaagccgcagacaacgccagttatccaggctctgcgaangacccgcatccgcnccgtnatggtgacaggggacaacctgcagacagcngtgactgtggc

SEQ ID NO: 1500 - DNA, 753 bp, Homo sapiens
agcgcatgagtgtggtggtggcgtggccaggggccactcagcccgaggcctacgtcaaaggctccccggagctggtggcagggctctgcaaccccgagacagcgcccaccgacttcgcccagatgctgcagagctatacagctgctggctaccgtgtcgtggccctggccagcaagccactgcccactgtgcccagcctggaggcagcccagcaactgacgagggacactgtggaaggagacctgagcctcctggggctgctggtcatgaggaacctactgaagccgcagacaacgccagttatccaggctctgcgaaggacccgcatccgcgccgtcatggtgacaggggacaacctgcagacagcggtgactgtggcccggggctgtggcatggtggccccccaggagcatctgatcatcgtccacgccacccaccctgagcggggtcagcctgcctctctcgagttcctgccgatggagtcccccacagccgtgaatggcgttaaggatcctgaccaggctgcaagctacaccgtggagccagacccccgatccaggcacctggccctcagcgggcccacctttggtatcattgtgaagcacttccccaagctgctgcccaaggtcctggtccagggcactgtctttgcccgcatggcccctgagcagaagacagagctggtgtgcgagctacagaagcttcagtacttgcgtgggcatgtgcggagacggcgccaatgactgtggggcc

SEQ ID NO: 1501 - DNA, 346 bp, Homo sapiens
  misc_feature (1)...(346): n = A,T,C or G
agggcgaattggagctcaccgcggtggcggccgaggtactacaaagctcagtccccagatgagggggccctggtcaccgcagccaggaactttggttttgntttccgctctcgcacccccaaaacaatcaccgtccatgagatgggcacagccatcacctaccagctgctggccatcctggacttcaacaacatccgcaagcggatgtcggtcatagtgcggaatccagaggggaagatccgactctactgcaaaggggctgacactatnctactggacagactgcaccactncactcaagagctgntcaacaccaccatggaccaccttaatgagtacctgcccg

SEQ ID NO: 1502 - DNA, 480 bp, Homo sapiens
  misc_feature (1)...(480): n = A,T,C or G
tccgccancatggaccaccttaatgagtacgcaggggaagggctgaggaccctggtgctggcctacaaggatctggatgaagagtactacgaggagtgggctgagcgacgcctccaggccagcctggcccaggacagccgggaggacaggctggctagcatctatgaggaggttgagaacaacatgatgctgctgggtgcaacggccattgaggacaaacttcagcaaggggttccagagaccattgccctcctgacactggccaacatcaagatttgggtgctaaccggagacaagcaagagacggctgtgaacatcggctattcctgcaagatgctgacggatgacatgactgaggttttcatagtcactggccatactgtcctggaggtgcgggaggagctcaggtaaacaagaagcccaggggaggcggtgctgtgcgttgtgcccagggctcaggtgggggtttctggaccattt

SEQ ID NO: 1503 - DNA, 1060 bp, Homo sapiens
  misc_feature (1)...(1060): n = A,T,C or G
cgtccggaaaggcgctgattctgtgatcatggaattactgtcggtggcttccccagatggagcaagtctggagaaacaacagatgatagtaagggagaaaacccataagcacttggatgactatgccaaacaaggccttcgtactttatgtatagcaaagaaggtcatgagtgacactgaatatgcagagtggctgaggaatcattttttcgcgtccgccagcattgacaacagggaagaattactacttgaatctgccatgaggttggagaacaaacttacattacttggtgctactggcattgaagaccgtctgcaggagggagtccctgaatctatagaagctcttcacaaagcgggcatcaagatctggatgctgacaggggacaagcaggagacagctgtcaacatagcttatgcatgcaaactactggagccagatgacaagctttttatcctcaatacccaaagtaaagatgcctgtgggatgctgatgagcacaattttgaaagaacttcagaagaaaactcaagccctgccagagcaagtgtcattaagtgaagatttacttcagcctcctgtcccccgggactcagggttacgagctggactcattatcactgggaagaccctggagtttgccctgcaagaaagtctgcaaaagcagttcctggaactgacatctttggtgtcaaagctgtggtctgctgccgagccacaccgctgcagaaaagtgaaagtggtgaaattggtcccgcagccatctccaggtgatgaccccttgcctattggtgaattggttgcccaatgatgttagcatgaatacaaagttggcaggacaattgggggatangggggtcctcaagggtcaaangaaaggcatgccagngctggtgatggcccagtngactttttgcncgttttctcangtttcaaaaccattctcaaacaaaggctccctttctttggtnccaatgggaccacctgggtgtttattaccaccgggcttttctcaaccatggaatttcttcntatttttttttcttaataaagaaatggt

SEQ ID NO: 1504 - DNA, 989 bp, Homo sapiens
  misc_feature (1)...(989): n = A,T,C or G
ccgccagactctaagggacatggtcaagttgtccatgcgggtgtgcgtgtgccggccagggggagaggaagagtgggtggactccagtgagctaccgcccggagactgcctggtgctgccccaggagggtgggctgatgccctgtgatgccgccctggtggccggcgagtgcatggtgaatgagagctctctgacaggagagagcattccagtgctgaagacggcactgccggaggggctggggccctactgtgcagagacacaccggcggcacacactcttctgcgggaccctcatcttgcaggcccgggcctatgtgggaccgcacgtcctggcagtggtgacccgcacagggttctgcacggcaaaagggggcctggtgagctccatcttgcacccccggcccatcaacttcaagttctataaacacagcatgaagtttgtggctgccctctctgtcctggctctcctcggcaccatctacagcatcttcatcctctaccgaaaccgggtgcctctgaatgagattgtaatccgggctctcgacctggtgaccgtggtggtgccacctgccctgcctgctgccatgactgtgtgcacgctctacgcccagagccgactgcggagacagggcattttctgcatccacccactgcgcatcaacctggggggcaagctgcagctggtgtgtttcgacaagacgggcaccctcactgaggacggcttagacgtgatgggggtggtgcccctgaaggggcaggcattcctgcccctggtcccagagcctcgccgcctgcctgtggggcccctgctccgagcactggccacctgccatgccctcagccggctccaggacacccccgtgggcgaccccatggacttgaagatggtggagtctactggctgggtcctggaggaagagccggctgcanactcaacatttggaacccaggtcttggcnnngatganaccccnactttgggagcccc

SEQ ID NO: 1505 - DNA, 181 bp, Homo sapiens
  misc_feature (1)...(181): n = A,T,C or G
caggggcattgtgattgccacaggagaccggacggtgatgggccgcatagctnctctcgcctcatgcctggaggttgggcggacacccatagcaatggagattgaacacttcatccanctgatcacaggggtcnctggattcctgggggtctccttcttcctgctctccctcatcctgggc

SEQ ID NO: 1506 - DNA, 503 bp, Homo sapiens
  misc_feature (1)...(503): n = A,T,C or G
ggggggcaagcnagaaaaaggaaggancccaggttaacaggcaggtggatacactgaagaagtccccccacnggtgagnggcccctaagaaggaatacatcaccccctggcccccaagaagggagcagaatggaggccgcacactccaagtccacagaggaatgtttgtcctattttggggtgagcgagaccacaggccttaccccagaccaagttaagcggcatctggaaaaatacggccccaatgagctccctgctgaggaaggcaagtctctgtgggagttggtggtagagcagttcgaagacctgctggtgcggattctcctcctggctgcctgcatttcctttgtgctggcctggtttgaggaaggtgaggaaactgtcactgcctttgtggagccttttgtcattctcttgatcctcattgccaacgccattgtgggggttttggcaggaacggaatgcagagaatgccatcgaggcgctgaaggaatatgaacccg

SEQ ID NO: 1507 - DNA, 752 bp, Homo sapiens
  misc_feature (1)...(752): n = A,T,C or G
ggccccacaattagcgcgctctctttctgctgctccccacctctcggatacagccgacaccatgggtttcggagacctgaaaagccctgccggcctccaggtgctcaacgattacctggcggacaagagctacatcgaggggtatgtgccatcacaagcagatgttgcaagatttgaagccgcntgcataccccacccttacggcccactttttttcattacctattctagaaacataaaaaacaattaaagaccaaaggaaaaacgaaccagccagaaatataangaaaataaatttaaacctaacgactagaaacacaccataanagaaagaaataaaaaaaacatacagggtaactacacagataaacataaaacctaaaaatatgancgatgacaataanaactttgtctcaccnaataacnttaaaggntggnaaangttnancgnaagccaaaagnnggcnttancganaaaagaaacggtgtttncccaccaantnttnaantttnaagggnaatgncnatataaaacccttgncnattttgattccaaaagtttttcccaattntancttannnanttnaaaccccangngngatnttaaaancaaaagnttttgnacganatnnaannaggngannttttnaagaacngaattaaaanacatcccggtnatggntttttngggnataaatntnaacntnattccanantnnggaannagngatntnnaggancntttaaannn

SEQ ID NO: 1508 - DNA, 638 bp, Homo sapiens
ccttttttttattttttttttaatctttcaaacttttatttaaatgccatgacccaggatggattttagatcttgttgaaagcagccacatccatggactgcacatagtcctcaaaagcagtgatctgctcctccagcatatctgttccaactttatcatcttcaactacacactgtatttgaagtttcttaattccgtatcccactggaactagtttagatgagccccagactaagccgtctgcttgaatgcttctgacgcactcctctaatttcgccatatctgtctcatcatcccaaggtttaacaactagtaagatggaagacttggcaacaagtgcaggctgtttggctttttctgaatcataacgtgcaagacgtacctcagtaatccactttgccacttacctaccatcaaaagaacaaaaacgaaaaacgccaatctcatcatcatatatagcataagcagctccacttccagtagcgtataccacatcagccggaccatattggcccaaagctttctacactcctggcaggcttggccttttcctacctcaaagacttgatgcgaccataccaacgaacatcaagacacacgtcggcacgcagtggccattacacgcattcaaaaactg

SEQ ID NO: 1509 - DNA, 493 bp, Homo sapiens
cgtacacacactcaggcttaaaatcttgttgaaagctgcaatatcaacactttgcacgggctcctaaaacttggggatctcctcctccaaaaagtgtggccccaccttgtcgtcctccaccacacactgaatctgtagcttccggataccgtagccccacgggccaccaacttggaagccccccaaaccaacccgtccagctggatagagcgcacacaggccttcagctgagccatgtccgtttaatcatcccaagggttaaaatccaaaaggaaggaggacctggccaccagggcaagctttttggcccttttttcccgtataccgcacgaaccctccctcccgaaagagggccgctctctttcacttctccaaaatgacatcaaaaaacaaaaaggcatatctcccacacacttgttgggggggctggctctatgctcggggctacacttgcccatggaaaaacttacttggtttggggcgccgggcccgg

SEQ ID NO: 1510 - DNA, 465 bp, Homo sapiens
  misc_feature (1)...(465): n = A,T,C or G
gtccggcgagctgagtggttgtgtggtcgcntctcggaanccggtancgcttgcagcatggntgaccnactgactgnngagcagattgcagaattcaaagaagctttttcactatttgacaaagatggtgatggaactataacaacaaaggaattgggaactgtaatgagatctcttgggcagaatcccactnaagcagagttacaggacatgattaangaagtagatgctgatggnaatgtcacaatngacttccctgantttctgacaatgatggcaagaaaaatgaaagacacagacagtgaagaaganattagagaagcattccgcgtgtttgataaggatggcaatgggctatattagtgctgnagaacttncgccactgtgatgacaaaccttggagacgaagttaacagatgaaggaagttgattgaaatggatcatggaaagcnagatattgattgg

SEQ ID NO: 1511 - DNA, 271 bp, Homo sapiens
  misc_feature (1)...(271): n = A,T,C or G
ttgtgtggntcgcgtctcggaaaccggcngcagcttgcagcatggctgaccaactgactgaagagcagattgcagaattcaaagaagctttttcactatttgacaaagatggtgatggaactataacaacanaggaattgggaactgtcatgagatctcttgggcagnatcccacanaagcagagttacaggacatgattnatgaantanatgctgntggtaatggcncaattgacttncctgaatttctgacnatgatggcnagaaaaat

SEQ ID NO: 1512 - DNA, 257 bp, Homo sapiens
  misc_feature (1)...(257): n = A,T,C or G
ccggcnagcngagcggntgtgtggncgcgtctcggaaaccggtngcgcttgcancatggctgaccaactgnctgaagagcagattgcagaattcanngaagctttttcactatttgacaaagatggtgatggaactataacaacanaggaattgngaactgtaatgngatctcttgggcnnaatcccacagaagcannngtnacaggacatgattnatgaagnnaatgctgatggnantggcacaattgacttccct

SEQ ID NO: 1513 - DNA, 490 bp, Homo sapiens
  misc_feature (1)...(490): n = A,T,C or G
ctgaccaactgactgaagagcagatagnagaattcaaagaagctttttnnttatttgacaaagatggtgatggaactangncaacantaggaattgggaactgtaatgagatctcttgggcagaatcccacagaagcagagtttacaggacatgattaatgaagtagatgctgattggtaatggcacaattgacttccctgaatttctgacaatggatggcaagaaaaaatgaaagacacagnacagtgaaggaagaaanttagagaaagccattccgtgtgttttgataaaggatggcaatgggcctatattaggtgctgcagaaacttcccccatgttantgnnccaaaccctttggnaagnaggaaaggtttaaaccagnattgnaaagaaagntttnanntnaaanntnaatncagggngaaagcccagaattattggaatgggtggattgggttccaaagttaaaacctaatggaaangaggttt

SEQ ID NO: 1514 - DNA, 314 bp, Homo sapiens
  misc_feature (1)...(314): n = A,T,C or G
ccagtcagcgcgttagcancagcagaagcggaggcacctcggcggtcacagcccctgcgctggtgcagccaccctcgcctgctccgttcttccttccttcgctcgcaccatggctgatcagctgactgaagagcagattgctgaattcaaaggaagcttttctccctattcgataaagatggtgacggcaccatcacaaccaaggaactggggaccgtcatgcggtcactgggtcagaacccaacagaagccgagctgcaggatatgatcaacgaagtggatgctgatggcaatggcaccattgacttcccaga

SEQ ID NO: 1515 - DNA, 452 bp, Homo sapiens
caccaccacgcgtccgggctacggctgccgcaccctggtggtgtgtgagggccaggccctgctggacgtgacccacagcgagctcactgtgaccgtgcgtgtgcccgagggccggtggctctggctggattatgtactcgtggtccctgagaacgtctacagctttggctacctccgggaggagcccctggataaatcctatgacttcatcagccactgcgcagcccagggctaccacatcagccccagcagctcatccctgttctgccgaaacgctgctgcttccctctccctcttctataacaacggagcccgtccatgtggctgccacgaagtaggtgctacaggccccacgtgtgagcccttcgggggccagtgtccctgccatgcccatgtcattgggccgtgactgctcccgctgtgccaccggatactggggcttccccaactgc

SEQ ID NO: 1516 - DNA, 546 bp, Homo sapiens
agaattcggcacgaggattctgttgctggtggggtgggcaagctgggactccagagcaggcctgccttgccctcctccctatcaggtacatgggctttgcatctgtccccaccagtcggtgcacactgtgagtgctgccaagacctgcaccaggatcatccatgacatgcagcagagcctgggcacccccatgcctgctgggatgaatgccatgctctactctgcctggccatacctgccacaggtccgcccaccccatatctacctttctggttctgcctcagaatgtgagtgccatgggcatgtctacagttgtcactttgacacagctgtgtgtctggttatgtgagtggaggtgtgtgtgatgtgtgtcagcacaacacagctgggcgccactgttgagttctgctggcccttcttctactgtcatccctgagaggatccctgttcccctcggtcctgcagacatgagtccttcaacccctaatcccaacactgactcttatccttcagctccatggtgacctctgacctaattccatcctt

SEQ ID NO: 1517 - DNA, 464 bp, Homo sapiens
  misc_feature (1)...(464): n = A,T,C or G
ccgaacagctctggctctggatgtaaaagccccctgggacgggtttcagggctgcctaaggctcatcaccattggtgacaaagcggtggatcccatcttagtacagcagggggcgctggggagtttcagggacctccagatagactcctgcggcatcacagacaggtgcttgcccagctactgtgagcatgggggcgagtgttcccagtcgtgggacaccttctcctgtgactgtctaggcacaggctatacgggcgagacctgccattcctctctctacgagcagtcttgtgaagcccacaagcaccgagggaacccgtctgggctttactatattgatgcagatggaagtggccccctgggaccatttcttgtgtactgcaatatgacngacgccgcgtggacggtggtgcaggcacggtggccccgacgcnggtgaccctccgaggtgcccccagcgggca

SEQ ID NO: 1518 - DNA, 498 bp, Homo sapiens
  misc_feature (1)...(498): n = A,T,C or G
caagccctcatgtgcctgctgccgacctggattcangggcacctactgtnaactccacatcnncgactagtgaccgtaacccttgcggcccacggtggcacttgccatgacctggagaatgggctcatgtncacctgcnctgccnncttctctggacaactctgntatgtgctgacatacattgaagatctnngccttagagtgcctaccttgancaggncnntntggtacacttacctctacatngaaatctttnngtacaaatgaanttatngctttgngggcagctcgctgnnagncaccgacgtggactnangcaaccagcttccnctaactaattctaccgcatatggacaggaccttttgacaangnaaagctggataatgctntntagcagcccccattagcacttttggttatncaattngtntnttgacnggcncacaatggacatgnaccggnaggngccnaacgggtccgntctttggtgggncctt

SEQ ID NO: 1519 - DNA, 567 bp, Homo sapiens
  misc_feature (1)...(567): n = A,T,C or G
tgacaagaaagtgctacangngcaccagcaacccctgtnccaacnngngacagtagnctggaccgaggnncaagccctatgtgcntgctgccgacctggattcangggcacctactgtnaactccacatcnncgactagtgaccgtaacccttgcggcccacggtggcacttgncatgacctggagaatgggctcatgtncacctgcnctgccnncttctctggacaactctgntatgtgctgacatacattgaagatctnngccttagagtgcctaccttgancaggncnntntggtacacttacctctacatngaaatctttnngtacaaatgaanttatngctttgngggcagctcgctgnnagncaccgacgtggactnangcaaccagcttccnctaactaattctaccgcatatggacaggaccttttgacaangnaaagctggataatgctntntagcagcccccattagcacttttggttatncaattngtntnttgacnggcncacaatggacatgnaccggnaggngccnaacgggtccgntctttggtgggncctt

SEQ ID NO: 1520 - DNA, 292 bp, Homo sapiens
  misc_feature (1)...(292): n = A,T,C or G
cnacgcgtccggtntgcaaaggctggtgccgttgagaanggggtcccnntgtaccgccacatgnntgncttggntggcaactntgaagtcatnctgccagncccggcgttcaatgtnatcaatggctggtanctcatgctggcaacaagctggncatgcnngagttnatgatcctcccanncngngcagcnaacttnacaggaagccatgcgcattgcagnataggtttaccacancctgaagaatgtanttaagganaaanntggnaaagangccnncaatgtgggggatg

SEQ ID NO: 1521 - DNA, 499 bp, Homo sapiens
  misc_feature (1)...(499): n = A,T,C or G
gccccgcgtccgggngcacggngatctngccggctttacgttcacctcggngtctgnancaccctccgtttgctctcctangcnacgagacccagnggctngaagttcaccatgnntattntnaaganccatgccagggagannttngactctngcggggatcncactgnngnggntganctcttnacntnananggnctctnnanagntgctgngcccagtggtgcttnaactggtatntatnnngncctannnctnctggncnatgataagactcgntntatagnggaagnggatgggatcaanngcttgtgtgatnnccncnatngaactatngctcctgncctgngngggcaagaaacttgnacgtcacataacaagagangattgacaaactgnatgatcgagatggatgggaacaggaaaataaatctaaggttttggtgccgaacgccttggggggggtgtccnttgccgtctgnaaanctgggtgcccgtt

SEQ ID NO: 1522 - DNA, 452 bp, Homo sapiens
  misc_feature (1)...(452): n = A,T,C or G
ccacgcgtccgaccggtacacggagatctcgcctggctttacagttcacctcggtgtctgcaggggcctacgcttcctctcctaggngacgagacccagnggctngaagttcaccatgtctattctcaagatccatgccagggagatctttgactctngcgggaatnccactgnngaggtngatctnttcacctnaaaaggtctcttcngagctgctgngcccagnggngcttgaactggtatctatgangccctagagctccgggacaatgataagactcgctatatggngaagggngtctcaaangctgnntgagcacatcaataaaactatngcgcctgccctggntagcaagaaactgaacgncacagaacangagaagatngacaaactgatgatngacatggatggaacagannataaatctaagttnggtgcnaacgccattctg

SEQ ID NO: 1523 - DNA, 321 bp, Homo sapiens
  misc_feature (1)...(321): n = A,T,C or G
cccgcgtccgacggagatctcgccggntttacgntcacctcggtgtctgcagnaccctncggttcctctcctaggcgacnagacccagtgggtagaagttcaccatgtctattctcaagatccatgccagggagatttttgactctngngggaatcccactgaacgaggtngaactctncacctnaaaaggnntnttcagagctgctgtgcccagtggngcttnaactggtatctatgaggccctagagctccgggacaatgataagactngctatatggggaagggtggntcaaaggntggtgagcacattaataaaact

SEQ ID NO: 1524 - DNA, 513 bp, Homo sapiens
  misc_feature (1)...(513): n = A,T,C or G
gcgtccgcacggngatctcgccggctttacgtncacctcggtgtctgcagcaccctccgcttcctctcctaggcgacgagacccagtggctagaagnncaccatgtctattctcaagatccatgccagggagatctttgactctcgcgggaatcccactgnttgggggtngatctctttcaacctcnaaaanggtctntttcagagcttgctggggcccaagnggtgctttaactggtatctatgaaggccctaagagctcccgggacaatgataagactcgctatattggggaaggggtgtctcaaaaggctgtngaggcacatcaaattaaaaactatttngcgcctggcccctgggtttagcaaggaaaactgaaaccgtttaccagnaaccaaaggaagaaaggatttgggacaaaacctggatggattccgaggatgggatggggaaccaagaaaaaaattaaattcntaaaggtttttggggtggccgaaaccggcccatttcttgg

SEQ ID NO: 1525 - DNA, 577 bp, Homo sapiens
  misc_feature (1)...(577): n = A,T,C or G
caagagaagattgacaaactgatgatcgagatggatggaacagaaaataaatctaagtttggtgcgaacgccattctgggggtgtcccttgccgnctgcaaagctggtngcccgatgaagaagggggggtccccctgtaccgccacatcgctngacttgggctcggcaacntctcgaagtcatcctgccaagtccccggcagttcaaatggtcatcanatgggcggtttctcatggctgggcaacaaaagcttgggccatggcatggggaagnttcatggatcctcccaagttccggggtgcnaagctaaaacctttnangggggnanaagccatcgccgccattttgngtangccaagtaagtggttttacccacaaacccttggaaaagnaaatggttcaatccanaagnggaagtaaaaataattggggggaaaaggatgcnccacccaaatngttgggggggggaatggaaaagggccggggtntttggcttccccaaaccatccctgngaagaaaataaaaagaaagggccttgggnagccttgcnttgaaaagaactggcttatttgggga

SEQ ID NO: 1526 - DNA, 530 bp, Homo sapiens
  misc_feature (1)...(530): n = A,T,C or G
ccncgcgtccggaagtgatnatgggcacatacaaaaatgcagcggagatggttgacctgtatgtggatctgatcaacaagtacccttcaattattgccttaattgatcctttcaggaaggaggactctgaacagtgggacagcatctatcacgcacttggttccaggtgttacataattgcaggaactgcttccaaaagcatttctaaacttntagagcaaggaaacatcagcatccccaaatccaatgggctgatcataaaacacacaaaccaaactacaatgtctgacttggtggaaataaccaatctgattgacagtaagaagcacatcactgtctttggaagtacagaaggagaatcatctgatgacagccttgtcgatttggctgttgggcttggtgtccggttcatcaagttggggggtctttcccgtggtgaacgagtgactaaatacaaccgncttctnactatagaggaagaacttgtccagaatggaacactgggtatgcgctgctttcttgcttttggt

SEQ ID NO: 1527 - DNA, 447 bp, Homo sapiens
  misc_feature (1)...(447): n = A,T,C or G
ccgagcacggagatctcgccggctntacgttcaccncggtgnntgcagcaccctccgcntnctcngctaggcgacgagacccagtggctacgaagtncaccatgtggnattctggaagatccatgccagggagatctttgactctcgcgggaatcccactgttgaggnggatctcttcaccncaaaaggtctcntcanagctgntgtgcccagcggtgcttcaactggnatctatgaggccctagagctccgggnacaatgataatgactcgctatatggggaagggtggtcnnaaaaggcgtgttgagncacatnatataaaaacctatctgcnccttgcccttggtttagcaaggaaacctggaancgtcaacannaacaaggagnaagnatttgtaccaaaacttgaatgatncgaagaatgggtntgggganaccaggaaaaa

SEQ ID NO: 1528 - DNA, 337 bp, Homo sapiens
  misc_feature (1)...(337): n = A,T,C or G
cccgcgtccgggagatctcgccggctttacgttcacctcggtgtctgcagcaccctncgcttnctctcctaggcgacgagacccagtggctagaagttcaccatgtgntattctcaagatccatgccagggagatctttgactctcgcgggaatcccactgttgaggttgattctcttnaccttcaaaanggtcttcttcanagctgctngcgcccagncggtgcttcaacttggtatctatgaggccctagagctccgggacacatgataacgactcgctntatggggaagggngtntcaaaggcntgnttgaagcacatcaattaaaaactattg

SEQ ID NO: 1529 - DNA, 259 bp, Homo sapiens
  misc_feature (1)...(259): n = A,T,C or G
gtccggaggccctanagctncgggacaangattangactcgctatntggggaagggtgtctaanaggctgtngagcacatcaataaanctattgcgcctgccctggctagnaagaaactgaacgtcncagancangacaagattgacaaactgatgatcgagatggntggaacananaataaatctaagtttggtgcgaacgccattctgggggtgcccttgccgtctgcaaagctggtgccgttgagaagggggtccc

SEQ ID NO: 1530 - DNA, 543 bp, Homo sapiens
  misc_feature (1)...(543): n = A,T,C or G
cgcggacacggagatctcgccggctttacgttcacctcggtgtctgcagcaccctccgcttnctctcctaggcgacgagacccagtggctagaagttcaccatgggtattctcaagatccatgccagggagatctttgactctcgcgggaatcccactgtagaggttgatctcttcaccttaaaaaggtntcnttcaagagctggcntgtgcccagtggngctannaactggcatactatgnaggccctagagctncgggacaatgataagactcgctatanggggaagnggtgtcttcaaaggctgntgaagcacatcnatcnnactaattgcgccctgcccntggnttagcanagaaactgaaacgttacaggaaacaaaggagaaanatntgacanaantggatgatcgangatnggattggaaacaggaaaaaataaaattgctaaagncttgngtgccgaacngcccntttctggggggggtggtccctttggcccgtcatggctaaaancnttnntgcccgntntggaanaaagggg

SEQ ID NO: 1531 - DNA, 390 bp, Homo sapiens
  misc_feature (1)...(390): n = A,T,C or G
ccttcncaccccaccncaccncnttaccaccttcttnattttcatccccaagggccagccttcatanacataaaaaaaatctnngcccnnaaaatcctggactcccccannaaccccacantgaaggtgnatctntatactcccaaaggtcttttccggcntccattccccantgaaccctctacngccatctataaancccctnnanctgagggatgnaaacaaacancnttacttangcaaaaatatcctnaagcantnnaccacatcaactccaccatcncnccacccttcatcaactcattaanncctnctctttnctnnnnatancannnccananttctnnaaaaatcccnnancanncannannaannnaaaaaaaaancccc

SEQ ID NO: 1532 - DNA, 339 bp, Homo sapiens
  misc_feature (1)...(339): n = A,T,C or G
gcgtccgnacggagcatctcgccggnnttacgtacacctcggggtctgcagcaccctccgcttcctctcctaggcgacgagacccantggctagnngttcaccatgtctattctcaagatccatgccagggagatctttgactctcgcgggaatcccactgttgaggttgatctcttcacctcaaaaggnctctttcanagctgctgttgcccagatggtgcttcaacttggtatctatgaggcccttagaagcctccggggacaatggatanagactcgcctatatggggggaaggggtggtctcaaaggctggttgagccacatcnaataaaaaacc

SEQ ID NO: 1533 - DNA, 324 bp, Homo sapiens
  misc_feature (1)...(324): n = A,T,C or G
gtggtcgcggccgaggtacagggngacccncttctnaacggnnccanctttncngacggcaagggacacccccagaatggctgttctcaccaaactnagattnattttctgtnccatccatctcnatcatcaggttnggtcaatcttctcttgctctgngacgntcantttcttgctaaccagngcangngcaatanttttatngatgtgctcaacagcctntgaaacacccttncccatatancnagtnttatcattgncccngagctctagggcctcatanataccanttgaagcaccactgggcacannnnctatgaaaan

SEQ ID NO: 1534 - DNA, 377 bp, Homo sapiens
  misc_feature (1)...(377): n = A,T,C or G
cantggtgtctatcnaatatncctttngggnggatgactggggagcttccaaaatttcacagccagtgcatgaatccaggtagtgggggatgatctcacantnaccaacccaaagaggatcnccaaggccnttaactataagtcctncaactgcctcctgctcaaagtcaaccanattggctccttgaccgagtctcttcatgcgtncaanctngcccaggccaatggttggggccgtcatggtgtctcatcgttcnggggagactgaagataccttcatcnctgacctngnttnnngggctgtncactgggcatatcaatactggtncccctttccgatcttaaccctttgccaantacaaccaagcttncttaaa

SEQ ID NO: 1535 - DNA, 398 bp, Homo sapiens
  misc_feature (1)...(398): n = A,T,C or G
gagcacggagatctngncngcttnacgttcacctcggtgtctncagcaccctccgattactctnctangcagaccngacccacnggctagangttnancntgtctatnntcaananccatgccngggagatcttngactctcgcnnnaatnccactgtngaggttgatcnnttcacctnaaanggtctcttcagagntgctnagcccagcggtgcttcaactggtatctatcgaggctcctacgagctagnggnacacgtgatcaagnctccgatatatggacgaaggggtcgtctcaantggtangnngaagngacnatgaatagagcttattgcgccctgccctgggttagcaccaaactagaaccgccacgcgaacacgatgaagattgacaaac

SEQ ID NO: 1536 - DNA, 343 bp, Homo sapiens
  misc_feature (1)...(343): n = A,T,C or G
ccccggaacaactcnacgcgccactaccaccgtctgagtctgcagtcccnagatccnanccatnatgtccatagagaagatntgggcccgggagatcctggactnncgcgggaaccccacagtgnaggtggatctctatactgccaanggnnttttgcngtctgnagngcccattggagcctgtacggggcatntatgangccctggagctganggatggagacaaacnncgttncttaggcaaaggngncctgaangnagtgnaccacatcnnctccacnatatggcnannccttatnatgntcaagactctctgagnctgagcaagagaaactggacaacc

SEQ ID NO: 1537 - DNA, 470 bp, Homo sapiens
  misc_feature (1)...(470): n = A,T,C or G
ccgnctttttctctgtgttctcttttggggttggatacagaagaactccatggctcaccacatggctcaccacatggcttaccacatattggaaagagccttgttttttgaattgctttattgagaaaagctgcccatctccccccccccgcccnccccaaaaatctaacagccaatnacacaatgatgataaattgctagagacaagtatatgaaaaaattanacatgtgatgaagaaacttgctatcattactgttatttggcattattctanaacttgtngcctatgtagtattaaaaatgaggtataggacactgtcccagctgncacctagactcgttncatcgaggaccccttntgaccagaatgactgggccacttggacctcgttcctctcaggggtggacatccanattgtgggggatgacctgacagtcaccaaccccaagaggattgcccagtcctttg

SEQ ID NO: 1538 - DNA, 2856 bp, Homo sapiens
  misc_feature (1)...(2856): n = A,T,C or G
ccccaggccgctgcgtcgcggggagctgggctcgggccgccggcggttgcgccggggcagccccgcggggagagcaccatgaggactgactcgggggctcggatggggaagaatcctgtgcgtcctccacgagctcttccacctgtgccaagtcaagatgatattccacttagtcgtcctaagaaaaagaagcccagaacaaaaaacacaccagcaagtgcttctttggaaggccttgctcagactgctggtcgaaggccctctgagggcaatgagccatcaactaaagaactcaaagagcacccagaggctcctgttcaaagaagacagaaaaagacaaggctacctcttgaattggagacttcctccacccaaaagaagtcatctagttcatctttattacgaaatgaaaatggtattgatgcggagccaagctgaggaggcagttattcaaaaacctcggaggaagacaaagaaaacccagccagcagaattacagtatgccaatgagctaggagtagaagatgaagacataatcactgatgagcaaactactgtggaacagcagtctgtattcactgcacccactggcattagccagcctgtaggcaaagtatttgtggaaaaaagccggagattccaggctgctgatcgttcagagttgataaagaccacagaaaacatagatgtgtcaatggacgtgaagccttcctggaccaccagagatgtggcacttacagtgcaccgggctttcaggatgattggtctcttttctcatggattcttggctggctgtgctgtgtggaatattgttgtgatatatgttctagcaggagatcagctatccaacctctcaaaccttctgcaacaatacaagaccctagcgtatccattccagagtcttctgtacttgcttttggctctgagtacaatttcagcttttgacaggattgactttgctaaaatatcagtagcaatccgaaattttttggccctggatcctacagctttagcatctttcttgtactttactgctcttatactatctctgagtcagcaaatgacaagtgacagaatccacctttacacaccttcttctgttaatggtagcctctgggaagcaggaattgaggaacagattctccagccatggattgtggtgaatctcgtggtggctcttctggttggattatctttggctatttttgtcttataggccaggcatggatcttagtgaagagttaatgttctcctcagaggtgggaagaatatcctgataaagagaaagaaatcaaagcctcttcataataccagctcacctttggaggaataatgacccagtatttgtcccatttttgtttttaaatgtatttttataagatntatacatgtgtatttgtaatanattttttgattatataatactgaaacatctctcaatattatgaaaaatgttaaaattgtgtttgctgtttatgtctaaacattaatttgtctagcattatcatcttaatgacaaagggaataatgaactagaaaccagcaagtgaaagtgtttatttcctattttctcaaaacagttgtatttataactattaccttaaaaagcactggtttagaaaaagccataacttaaatagtgttataaaatatatatcaggtttaaacataaatttagcgaatatggtagaagggaaaaaagccttcatttttgacctccccttactgaataaattgaaatatgaagtttgtcttttctgaaactggcttagtgattgagtatcatgtaataattataatataatttagcttgaaagatgctctacattatgaccaataaaaagggaatgtatgttttgtttgaaaaattatataacctaaattttttacctagaagtaactaaaaagttgcttctcattataatctgtactagtggttctcatatctggttgtacatcaggatcatagagggagattttaaaaatctatgtagcaaaagaggctgagcagggcaaggctcaggggaataaaggagagacctgtgagcttgtgggctcccagttgacatctgcagtaccctttcctctgtcccttttttctgagtgacaagaaataggagtagaaattcaccatctctgttctccagctctttgtcagagaggtttctggttttccaggaaatccccctcttgagatgggtcctgcactgggaaagatctcttcagaactatatccaatggtacctcagctgttgtatatgagaccctaaagctcaagttgaggagaagactagctatgggaaaaaatgtttcaaaggctgttgagcacatcaataaaactattgagcctgccctgattagcaagcacctgaatgttatagaacagaagaggattgacaaattgatgatagagacagttgaccctgacaataggtctaaatttggagtgaacattatactgggaatctcttttgctgtttgtaaggctggagctgccgaaaagggattctccctgctgtcacagaattgtgaatttgctggcaattctgaaggcatcctgctagttccagctttcactgtgaccagcaatggttctcaatctggcaataagctggcagtataggagttcataatcttccccgtcagcaaacttcagggaagccatgctcgttagagccaaggcttagcacacttgagccgtgtcatcaaagagaaatgtgagaaagctgctgccaatgtgggggattgtggtaggctgcataatgtctcctaaagatgtccatgtcctaatcccttggaacttgtgaatatactactttacttggccaaagggatttgcagatatgattaanggta

SEQ ID NO: 1539 - DNA, 135 bp, Homo sapiens
  misc_feature (1)...(135): n = A,T,C or G
cgccggaacaagttggccatgcaggagttcatgatcctcccagtgggtgctgagagctttcgggatgccatgcgacttggggccgaggaggtaccacacactcaagggggtcatcaaggacaagtacggnaagga

SEQ ID NO: 1540 - DNA, 259 bp, Homo sapiens
  misc_feature (1)...(259): n = A,T,C or G
cgnngcgaagggggtcccnctgnnccgncncatcgctgacttggctggcaactctgaagtnatcctgncagtcccggcgttcaatgncatcaatggnggttctnatgctggcancangctggccatgcaggagttcatgatcctcccagttcggcgcancaaacttcagggaagccntgcgcattggagcagaggttnaccacaacctgaagaatgtcatcaaggagaaatatgggaaagatgccaccaatgtggggga

SEQ ID NO: 1541 - DNA, 176 bp, Homo sapiens
  misc_feature (1)...(176): n = A,T,C or G
cgcgttcgcttngacctnaattcttgnctgcgttccccncgncgnctggancnccctccgttttntctnttangctnacnagacccagtggttngangtncaccatgtgtattctcaagatccatgccagggagatctntgactntngcgggaatcccactgtngaggttgatctc

SEQ ID NO: 1542 - DNA, 204 bp, Homo sapiens
  misc_feature (1)...(204): n = A,T,C or G
agtgcaggaatacangtattgtgggatgatcacacagngaccaacccaaagaggatcgccaaggccgngaacgagaagtcnngcaaangncntctgctnaaagacaaccagaatggctccgtgaccgagnnctctncaggcgngcaagctggnccaggccaatggntggggcgaaaaggagaaancanngnttcgggggagact

SEQ ID NO: 1543 - DNA, 450 bp, Homo sapiens
  misc_feature (1)...(450): n = A,T,C or G
cnccncgcgtccgggagccggananctcgccggctttacgntcacctcggngnctgcagnaccctncgcttnctctnctaggcgacnagacccanaggctngangttnaccatgtgtattntnaagatccatgccagggagatctttgactctngngggnatncnactgatgaggttgatctcttcacctcaaaaggtctcttcagagctgctgntnccagnggngcttcaactggtatctatgnggncctananctncgggacaatgatnngactcnctatatggggaagggngnctcaaaggntgcngagcacatcaatanaactattgcgcctgccctggttngcaagaanctgaacgnnanagaacaagagangattgacaaactgatgatcnagatggntngaacngaaaataaatctaagtttgggngcgaacgccattctggg

SEQ ID NO: 1544 - DNA, 334 bp, Homo sapiens
  misc_feature (1)...(334): n = A,T,C or G
ctgccctgactccttacagggatcactgagattntnatgaacagaccttctgcccgcaatgccttggggaatgtnttcgtcagtnagctgctggaaactctggcccagctgcgggaggaccggcaagtgcgtgtcctgctcttcagaagtggagtnaagggcgtnttctgtgcaggtgcagacctgaaggagcgggaacagatgagtnaagcagagntgggggtgtttgtccagcgactccggggcctgattgaatgacatcggagggactcagaggctgccccgttgtnttgggggtggcccttgcgnaaggagctcatcttcaaggggccga

SEQ ID NO: 1545 - DNA, 496 bp, Homo sapiens
  misc_feature (1)...(496): n = A,T,C or G
acgcgactgggactaggccggaggcagcggggnaccggcaggctgtaggttccatgaggacaggccttgagtctgtcctggtctctggaatcaccngtgtctantagaggccagcacacagcaaatatataaatgtacaaatgagtgaatgaagagaatctgattggccttaaggaacttacgcacttaaaataattgggcagaagagaagcagtgaaggagtgcagaggcatcacctgaaagggatcactgagattctgatgaacagaccttctgcccgcaatgccttgnggaatgtcttcgtcagtgagctgctggaaactctggcccagctgcgggaggaccggcaagtgccgtgtcctgctcttcaagaagtggagtgaagggccgtgttctgtgccaggtgcagacctgaaggagcgggaacagatgagtgaagcaagaggtgggggtgtttgtccagcgactccggggcctgatgaatgacatcggtgag

SEQ ID NO: 1546 - DNA, 697 bp, Homo sapiens
tcccccgccaaaaacaaaaaaaaaaaagatgaatatggagggagttgtaaaattaaagaaggtacatgggtgcatgtgtgcttgtgtgtgtgtgtgtctgtctgtctaacaacagcagaagcaggcaagggctactgtggtagtcactgttgttcctctccccattttgcttcacagtttacaagtccttccactttctctctgaggcagaaagagcaagggtttttctctccattttatggttgggaaaattgaggcctgcctgagtgtgtgacttgtggcaagtcactctggtcatctagggcagaggctccccagatcccaggcctcctgcctccagtccccagcccgcagcccaggattaggcagagccagctgctttcccgtggctgccctgactccttacagggatcactgagattctgatgaacagaccttctgcccgcaatgccttggggaatgtcttcgtcagtgagctgctggaaactctggcccagctgcgggaggaccggcaaagtgcgtgtcctgctcttcaaaagtggagtgaagggcgtgttctgtgcaggtgcagacctgaaggagcgggaacagatgagtgaagcagaggtgggggtgtttgtccagcgactccggggcctgatgaatgacatcgcagccttccctgcacccaccattgcggctatggatggggtcgagc

SEQ ID NO: 1547 - DNA, 1511 bp, Homo sapiens
  misc_feature (1)...(1511): n = A,T,C or G
cgtccgccnacacgcccccgagacggtgcagggccggagaagcaccttcactcccagcctgcgccccgatgctgcgcgttctgtgcctcctgcgcccctggaggccccttcgggcccgcggctgcgcttccgacggggcggccgggggctcagagatccaagtgcgcgccctggcgggtccggaccaagggatcactgagattctgatgaacagaccttctgcccgcaatgccttggggaatgtcttcgtcagtgagctgctggaaactctggcccagctgcgggaggaccggcaagtgcgtgtcctgctcttcagaagtggagtgaagggcgtgttctgtgcaggtgcagacctgaaggagcgggaacagatgagtgaagcagaggtgggggtgtttgtccagcgactccggggcctgatgaatgacatcgcagccttccctgcacccaccattgcggctatggatgggtttgccttgggcggaggcttagagcttgccctcgcctgtgacctcagagtggcagcttcctcggcagtcatgggactgattgagaccacgcgagggctcctcccgggggcaggagggactcagaggctgccccgttgtctgggggtggccctggcgaaggagctcatcttcacgggccgacgactgagtggaactgaggcccacgtactggggctggtgaatcacgctgtggcccagaacgaggagggggacgccgcctaccagcgggcacgagcactggcccaggagatcctgccccaggcccccattgccgtgcggctgggcaaagtagccattgaccgaggaacggaggtggacattgcatctgggatggccattgaacggatgagctatgcccagaaatcttacacccaaaaccgtttagagggcatcgcagccttaaactacaacatgacacacaaatgccctgaagagcaggatccagaaggaagatttgtggccagattgccttcatcatttcacctctccagacttccatttcttcacaaggatgatgatggaaataaaatgactggcgtgatgcctggaaccaaggtgctgatcctaccacctactgctaccttccttagcttcaccctggctagaaataatcacgagggttgggtttgctttggaaaatgcctgtctctctacttgaatgataaagaattaaattagatctctctgagtcttggtatcattggctctcagcccctgacctctctcagttatcaggcactcattagagatgtcagaagattttaagatacccctagtttcttcctgtgaacaacagaggtaataaataaactctgacatcggttgaacatgtgtcaggggtcagactgcagatcccagtctctgccagttacttgctgtataaccgtggacaaattgtttaaatgctctgggcctcagcttcctcacctacaaaacaaaacttgtgaagatttagcaaaataaaaacacttcatattcaataaaaaaaaaaaaattgttaaa

SEQ ID NO: 1548 - DNA, 481 bp, Homo sapiens
  misc_feature (1)...(481): n = A,T,C or G
gaccatcgtctctccgccatggcggccccacgcgccctgctgcccagagcctgtagctcactgttgtcctcagtccgctgcccagaactacggcgcttcgcctcgggtgctaactttcagtacatcatcacagaaaagaaaggaaagaatagcancgtggggctgatccagttgaaccgccccaaagcactcaatgcactttgcaatggcctgattgaggagctcaaccaagcactggagacctttgagcaagatcctgctgtgggtgccattgtgctcactggtggggataaggcctttgcagctggagctgacatcaaggaaatgcagaaccgaacatttcaggactgttactccagcaagttcctgagccactgggaccacatcacccgggtcaagaaaccggtcatcgcagctgtcaatggttatgctcttgggggggttgtgaacttgccatgatgtgtgatatcatctatgctgg

SEQ ID NO: 1549 - DNA, 552 bp, Homo sapiens
taaaatacatatgtatatacttcattaacatgtaattaaatgattatcctctacggcacaaaaaaatagtacatcattagaatagatgtaatttgaaaattagctattatttcttaactagtacaaataatggaatagcaaaaagctatttttggtcttttagaaatcatattttaaaaagaaggctgcattacctcataaatcttgttaaggtgttttgcatgaacatgcatacggccattccatcctctggagttcctagtgatttcacagcattcagatcagatcctgaagagaaagtattttttgccccacggacaatgaggcctttcccctctgtccaattttccaattcaattactttttccagaagttgtagcatcataacacctgaaaaggcattcattctacttggattgttcagagtaagaatgccaatgccattgtcttccttctgaaggtcaatggatccaccaggaaactgctgaagtgtttttttcacttcttcctcataaaatccatgggatgtacctgcccgggcggccgctcgaa

SEQ ID NO: 1550 - DNA, 957 bp, Homo sapiens
ccccgcgccacgaaatggcgaaaagtcttttgaagacagcctctctgtctggaaggacaaaattgctacatcaaacaggattgtcactttatagtacatcccatggattttatgaggaagaagtgaaaaaaacacttcagcagtttcctggtggatccattgaccttcagaaggaagacaatggcattggcattcttactctgaacaatccaagtagaatgaatgccttttcaggtgttatgatgctacaacttctggaaaaagtaattgaattggaaaattggacagaggggaaaggcctcattgtccgtggggcaaaaaatactttctcttcaggatctgatctgaatgctgtgaaatcactaggaactccagagacttcctttaataagtgttgcgctggttcaaggttgggcattgggtggaggagcagaatttactacagcatgtgatttcaggttaatgactccagagagtaagatcagattcgtccacaaagagatgggcataataccaagctggggtggcaccacccggcttagttgaaataatcggaagtagacaagctctcaaagtgttgagtggggcccttaaactggattcaaaaaatgctctaaacataggaatggttgaagaggtcttgcagtcttcagatgaaactaaatctctagaagaggcacaagaatggctaaagcaattcatccaagggccaccggaagtaattagagctttgaaaaaatctgtttgttcaggcagagagctatatttggaggaagcattacagaacgaaagagatcttttaggaacagtttggggtgggcctgcaaatttagaggctattgctaagaaaggaaaatttaataaataattggtttttcgtgtggatgtacctcggccgcgacccagctaataataattacaaaacataaatgatattaaatatgaacatcagaatta

SEQ ID NO: 1551 - DNA, 1198 bp, Homo sapiens
  misc_feature (1)...(1198): n = A,T,C or G
tactatagggagtcgacccacgcgtccgacggactgggcctggcctggggcgtccccgcgaagcctgggcctgtcaggcggttccgtccgggtctcggccaccgtcgagttccgtcgagttccgtcccggccctgctcacagcagcgccctcggagcgcccagcacctgcggccggccaggcagcgcgatcctgcggcgtctggccatcccgaatgctatggccgccgtcgccgtcttgcgggccttcggggcaagtgggcccatgtgtctccggcgcggcccctgggcccagctccccgcccgcttctgcagccgggacccggccggggcggggcggcgggagtcggagccgcggcccaccagcgcgcggcagctggacggcataaggaacatcgtcttgagcaatcccaagaagaggaacacgttgtcacttgcaatgctgaaatctctccaaagtgacattcttcatgacgctgacagcaacgatctgaaagtcattatcatctcggctgaggggcctgtgttttcttctgggcatgacttaaaggagctgacagaggagcaaggccgtgattaccatgccgaagtatttcagacctgttccaaggtcatgatgcacatccggaaccaccccgtccccgtcattgccatggtcaatggcctggccacggctgccggctgtcaactggttgccagctgcgacattgccgtggcgagcgacaagtcctcttttgccactcctggggtgaacgtcgggctcttctgttctacccctggggttgccttggccaagaagcagtgcctagaaaggtggccttggagatgctcttcactggtgagcccatttctgcccaggaggccctgctccacgggctgcttagcaaggtggtgccagaggcggagctgcaggaggagaccatgcggattgctaggaagatcgcgtcactgagccgtccggtggtgtccctgggcaaagccaccttctacaagcagctgccccaggacctggggacggcttactacctcaccttccaggccatggtggacaacctggcccttgcgggacgggcaggagggcatcacggccttnctttcagaagaagaaaacctgttctggtcacaccagccaagtgtgagtngaggcagaaagaagtgaggcccacgggcagngcccaaggaacccacctttcccttttt

SEQ ID NO: 1552 - DNA, 405 bp, Homo sapiens
  misc_feature (1)...(405): n = A,T,C or G
ttgagcccaggagtctgagttgtgcctgggcaacatagcaatgaccctatcattttaaaaaatatggccagatagatttagtaaagaattcctaggaatgaaaaataattattgaataagtaagtggactgaagacagtaaatcanacacagctaattaatatcttagaagaaaggttttaataatttcttggaatgaagcanaggacaacaaggatagagaagatacaaaagaaggttaaggtatataaagggctggatgagaaggttaccatgcatatatagttagcatccatagccattgtggctatggatgggttcgccttgggtggaggcctggagcttgccctggcctgcgacctccaagtggcagcttcctcgaaagtcatggaactgattgagagac

SEQ ID NO: 1553 - DNA, 480 bp, Homo sapiens
ccacgcgtcccgcgaccaggacacccgaaatccaagtgcaggctctgacaggtcccaaccaagtgacagctagctcactccaggctggctgtcagtcactcaaggctgcccgtccgtcccttgcaggaatcactgagattctgatgaacagacctaatgcccgcaatgccttggggaatgtgtttgttagtgagctgctggaagctctggcccagcttcgggaagaccagcaagtccgggtcctgctcttcagaagtgcggtgaagggagtgttctgtgcaggtgcagacctgaaggagcgggagcagatgagtgatgtggaggtggggacctttgtccagcggctccgaggcctgatgagtgagatcgcagccttccctgtgcccaccattgcagccatggatgggtttgccttaggcgggggcttggaacttgccctggcctgtgacctccgaatagcagcttcttcggctgtcatgg

SEQ ID NO: 1554 - DNA, 215 bp, Homo sapiens
  misc_feature (1)...(215): n = A,T,C or G
cgcgtccggnaggaccnngccgagngggccattgtcctcaccgtgnggngataaggtctttgcagcnggagctgatatcaagganatgcagaaccttgagtttncangactgttactncagcaagttcttgaancnctgggacnacctcacccaggtnaagaagccantnatcgcntgntgncaatggatatgccttnggcgggggctgtgagct

SEQ ID NO: 1555 - DNA, 237 bp, Homo sapiens
  misc_feature (1)...(237): n = A,T,C or G
gtccggacctaattaaaactggngcccnggnnggtgtgccaatanctgggtgtntgggggaccaatgtgctgcattagnnggacaaatgtgcttncaggaggggcaagccaaaaacacctntggnacacgttgnttctnactgtgtaatncgggtcgtaaatgtgngttttctgaacatggncttttgaccacaggagcttacaaactaggnagagagaagccagnntattatgcac

SEQ ID NO: 1556 - DNA, 712 bp, Homo sapiens
  misc_feature (1)...(712): n = A,T,C or G
ttaaaaaaaacatgggaactgggacatttttggatattaacactggaaatanccttcaacagactactggaggcttttatccattaattgggtggaagattgggcaagaacttgtatgcttagctgaaagcaatgcaggagacactggtactgccataaaatgggctcagcagttagaccttttcacagatgctgctgagactgaaaaaatggccaaaagtttggaggattctgaaggagtttgttttgttccatcttttagtggattacaggctccattaaatgacccctgggcatgtgcctcttttatgggtttgaagccttctaccagtaaataccatcttgtacgagcaatattggagtcaatagctttcagaaacaaacagttatatgagatgatgaagaaagagattcatattcctgtaagaaaaatccgggcagatggaggagtttgtaagaatggttttgtcatgcagatgacttcagacctgattaatgagaatatagacagacctgccgacattgacatgtcatgcctgggtgcagcttctctagctggccttgctgttggtatgtgtgaaatttataagaatgagagttttcttgcaaactcttccttacagatagcatttctcctctcaaattacaaaattctagagagtcaaaaaaaaaatggcgtccattaaactccatacacatatgcatattactc

SEQ ID NO: 1557 - DNA, 565 bp, Homo sapiens
acagatgctgctgagactgaaaaaatggccaaaagtttggaggattctgaaggagtttgttttgttccatcttttagtggattacaggctccattaaatgacccctgggcatgtgcctcttttatgggtttgaagccttctaccagtaaataccatcttgtacgagcaatattggagtcaatagctttcagaaacaaacagttatatgagatgatgaagaaagagattcatattcctgtaagaaaaatccgggcagatggaggagtttgtaagaatggttttgtcatgcagatgacttcagacctgattaatgagaatatagacagacctgccgacattgacatgtcatgcctgggtgcagcttctctagctggccttgctgttgggttttggactgacaaggaggaactaaagaaactgagacaaagtgaagtggttttcaagccacagaagaaatgtcaagaatatgaaatgagtctggaaaactgggccaaagcagtgaaacgctccatgaattggtataacaagacataacactaaatgaaatgatcaaaaccataggtag

SEQ ID NO: 1558 - DNA, 432 bp, Homo sapiens
  misc_feature (1)...(432): n = A,T,C or G
ggaaatgagtttgtttcgcaactgactantnagcaccgctatgtgctccngatacacctnacngactgggaagggaatnaggctnactcattgtatgancantnctatctctccngtgaatanctccntnatgagattcgcctattnctgacttaccgggaccgccggnngaataaacntcntcatctnaccaangaactcattttagcacaaaggatgganactacgacaaatgtatttgcnttgttcacaantgcnaactggaggctggtggtttgatgcatgtggtcctacccncttgaacggaatgtactatccacagaggccgaacactggtaaattcaccgggnttnnaatggtantactggaaaggctctggctattcgctcaaagcccccaccatgatcattgcgaccagcaagatttctaaga

SEQ ID NO: 1559 - DNA, 389 bp, Homo sapiens
  misc_feature (1)...(389): n = A,T,C or G
gcacgagctcaagcctcctcgcggtccgcagtcagtgccgccgcgcccggactcccgcacgccccgcaggtatcgcccccgnccacggcccatagtgcgctcgcgccggcaccntctcccggatanacggngcgccgcacggagatgacagccgaggagatgaaagcgacngagancggggcgcaatcggcnccnctgccnatggatggagtggacatcanccccaaacatgacgaagcgtgtgaaggtcatcaanatanaaggctcaagttctgagatgcncatgattggggaccgantctttgtccactncnctggctgnctattaaatggcacaaagtttgactcnantctggatngcaanganaaattctcctttgactgggaaa

SEQ ID NO: 1560 - DNA, 385 bp, Homo sapiens
  misc_feature (1)...(385): n = A,T,C or G
cggcacgagggttagacagcagctctgccccaaaaccagccctttgtcttctcccttggcacaggccaggtcatnaagggctggnaccaggggctgntgggaatgtgtaagggggaaaagcccangctgggagatcccatccaanctaggtaaaaggcccntcctgagggtgcaaagcaagtttggggggngnaactggaaagggngaaagctgnttcagnttttaatnggncttaaccgaatccattcattacaatacatgcttcctccaagttgggctgggtctancantgantccagggcantatcattgaagcantcagtgtgtantggcccaantttgcccttgccaggcctttggaacccctttcccatttccattacc

SEQ ID NO: 1561 - DNA, 264 bp, Homo sapiens
  misc_feature (1)...(264): n = A,T,C or G
ggagtcgacccacgcgtccgcccncgccaggncgctgntgntncacgccgcccgtcgcgccgnccgnccgctnagcgtacgccgtcgncatgngagtgcacgtggaaaccatcttccngggagacgggcgcaccttccncaagcgcggncagacctgcgtggtgcactacacctgnatgcttnaaganggnaagaaatntgattcctcccgggacagaaacaagccctntaagtctatgctaggcangcatgaggtgatccgag

SEQ ID NO: 1562 - DNA, 443 bp, Homo sapiens
  misc_feature (1)...(443): n = A,T,C or G
catcnaaatcggggacttcattcgctaccactacaactgttctctgctggacagcaccaggctcttctcgtcccacgactatgaggcccctcaagagatcaccctcggagccaacaaagtgatcgaaggtctggacaggggcctgcagggcatgtgtgtaggagagaggaggcagctcattgtgcccccacacctggcccacggggagaatggagcccggggtgtccctggcagtgctgtgctgctatttgaggtggagctggtatcccgagaggatggcctgcccacaggctacctgtttgtgtggtaccaggatccttccactagcctttttgaagacatggatctcaataaagatggagaggtgcccccagaagagttctcttccttcatcaaggcttcaagtgaatgaaggcaaaggacgcctnatgcctgggcaagac

SEQ ID NO: 1563 - DNA, 205 bp, Homo sapiens
  misc_feature (1)...(205): n = A,T,C or G
cgtccgcgctgatgntcncgccgcccgncgcgccgcccgcccgctcagngtatcgccgccggcatgggagngcaggtggnaaccatntccccaggagacgggcgcaccttncccaagcgcggtcagacctgcgtggtgcactacaccgnnatgctngaagatggaaagaaatttgattcctaccgggacagaaacaagcccttta

SEQ ID NO: 1564 - DNA, 575 bp, Homo sapiens
cgcccacgcgtccggttcctgacccttgagaaaagagttggtggtaaatgtgccacgtcttctaagaagggggagtcctgaacttgtctgaagcccttgtccgtaagccttgaactacgttcttaaatctatgaagtcgagggacctttcgctgcttttgtagggacttctttccttgcttcagcaacatgaggcttttcttgtggaacgcggtcttgactctgttcgtcacttctttgattggggctttgatccctgaaccagaagtgaaaattgaagttctccagaagccattcatctgccatcgcaagaccaaaggaggggatttgatgttggtccactatgaaggctacttagaaaaggacggctccttatttcactccactcacaaacataacaatggtcagcccatttggtttaccctgggcatcctggaggctctcaaaggttgggaccagggcttgaaaggaatgtgtgtaggagagaagagaaagctcatcattcctcctgctctgggctatggaaaagaaggaaaaggtaaaattcccccagaaagtacctcggccgcgaccact

SEQ ID NO: 1565 - DNA, 560 bp, Homo sapiens
tccgcggacgcgtgctgcgtctaaacacttctttccctgaggactggaagacattagaataagctccagacaattcaaacattgagattcctgggaactaccagatagtagcatcagttcaccaagaaatgaagctggtgaggcagtgaaaatccagggcctagaaagctgggaatgccatgacgtgggcacattgaaagacaagaggcaggcatgatcagccttgaactttaggaagatcccaggaagctgatggaagacaagatgtggagtgaatgtgaaggtccagaaatgtccttggtgtgtttgacagactttcaggcccatgcgcgagagcagctgtctaagtcaactcgggattttattgaaggtggagcagatgacagcatcacgcgggatgacaacattgcagcatttaaaagaattcgcctccgtccgcggtacctgagagatgtgtctgaggtggacaccagaaccacaatccaaggggaggagatcagtgcccctatttgtatcgcacccacagggttccactgccttgtctggcctgatggggaaat

SEQ ID NO: 1566 - DNA, 484 bp, Homo sapiens
cgcgtccgagaatttgggttttgagctttttaaaaaaaaaaagacaaacactttccttgactttgagaaataatttaagtcaaagaatctgctctatgctaaccaagagatagagcacagcaaagatctgccagccccaggcctctacctagtggcctggaaattcaagtattcttattggtggaggccatttgtttctgattagaagctgtctaaacctcctactcctcaactcaaaggaaaacacagagcataccatggccaagaaagttgcagtgattggagctggtgtgagtggcctctcctccatcaaatgctgtgtggatgaggacctggagcccacctgctttgagagaagtgatgacattgggggatattgggaagtttactgtaccgtggttcatctctatcagtcatgatctggccatttgctttgtctctgctcagacatggtggctttagcctgccttggtgatcaagtaag

SEQ ID NO: 1567 - DNA, 335 bp, Homo sapiens
  misc_feature (1)...(335): n = A,T,C or G
ctttggaagtggtcatttcagatgtgattcatctagatggtgccatgacaatggtgtgaactacnggnntggagagaaatnggaccgtcagggataaaatggccagatnatgagctgcacatgtcttgggaacggnaaaggagaatttcaaagtgtgacccctcattaaggcaccgttgttatgatgattgggaagacataccacgtatgaagaacaattngcanaaggaatatcttcggttgccatttgctcctgcacatgcttttggangccagcnggggcctggcgctgtgacaactnccncaaacctnggggttgaacccaatccccgaaa

SEQ ID NO: 1568 - DNA, 553 bp, Homo sapiens
  misc_feature (1)...(553): n = A,T,C or G
cgttcgggaggcactgaaagaccagcagaggcntanggttcgggaagaggttgttacncgtgggcaactctgtcaacgaaggcttgaaccaacctacggatgactcgtgcttngacccctacacaagtttcccattatgcccgttggagatgagtgggaacgaatgtctgaattcaggctttaaactgttgtgccaagttgcttaggctttggaagtggtcatttcagatgtcgattcatctagatggttgccatgacaattggtgtgaactacaagattggagagaagttgggacccgtcagggagaaaaatggccagatgatgagcctgcnaccatgtcttggngaaccgngaaaaaggagnaattcaaagtgttgaccccttcatggaggccaaccgtggttaatgatgattggggaaggaccatacccacgttaggaagaaccaagttggccaggaagggaatatcttccggtgcccatttgctnctgcacatgctttgggaggcccagncgggggcttggccgcttgtnacaactgcccgcagacctt

SEQ ID NO: 1569 - DNA, 384 bp, Homo sapiens
  misc_feature (1)...(384): n = A,T,C or G
ccgtttgaaaccccttgnnnnccacgcntncgancgantgnntgcatcatgctntnnanaggtgngcccacgcttaggnttngnaagnggtcatntcagatgtgattcatctagngggtgccatgacaatggtgtgaactacannatngnaganaagtgggaccgtcagggagaaaatggccagatgatgagctgnacatgtcttgggaacggaaaaggagaattcaagtgtgaccctcatgaggcaacgtgttatgangatgggaagacataccacgtagganaacagnggcagaaggaatatntcggtgccatttgctcctgnacatgctttggangccagcggggctggccgctgatgacaactgccgnagacctgggggt

SEQ ID NO: 1570 - DNA, 493 bp, Homo sapiens
  misc_feature (1)...(493): n = A,T,C or G
ccagatgatgagctgcanatgtntggggaacggaaaaggagaattcaagtgtgaccctcatgaggcaacgtgttacgatgatgggaagncangctanatntanagaacaggggnagaaggaatatctcggtgccatttgctcctgcacatgctcttggaggccagccgggggctggcgctgngacaacttgctcgcagactctggggggtgaacccantcccgaagggcactactgggccagttcctaccaactcaagttattctcagnagnataccatccagtagnaacaaacacttaaatgtttanattngccccaattggagtgcttcattgcccntttagaatgtacaagggcctggacaagnagaaaanattttcntcnaggaggtaaaaatnaatctttccaattcccaagaagggaaccaaggccatgtttctcttctggcccaaggaatcccaattctaaaaacttngggagntggaatggttta

SEQ ID NO: 1571 - DNA, 504 bp, Homo sapiens
  misc_feature (1)...(504): n = A,T,C or G
gcgtccggttgttaccgtgggcaactctgtnaacgaaggcttgaaccaacctacggatgactcgtgctttgacccctacacagnttcccattatgccgntggagatgagtgggancgaatgtctgaatcaggctttaaactgttgngccagctgcttaggcctttgganagttgncncatnatcagtattgttgaatttcaatgctaagtattgggntggcccacttgtancacaacggggtaggtcgcaaanccttatcnaaagggaattttngggtnagtaagggaaaangatggnggtgaaacccccngttcntangngnggcnangccaanncncattttgnggtcnnccaatgngnattgnnacttggtaagntccnttgntcaaccaaattgggtnccttttttggggnggnaagaacctggggngaagaanaaactgnggnnaggggaanaantttncanaggttgttgnnnnccccctttcaattggaaggggcca

SEQ ID NO: 1572 - DNA, 342 bp, Homo sapiens
  misc_feature (1)...(342): n = A,T,C or G
gaatcctttcggnntttganccnagggncggagagaaaacctatgctaggaangggaangngcangcnntgaatttangggacactgtgaagcantcntggatgcaatgaatagagggntctgctgtgtnctgctgctgtgtgganctnncttctnttcngccaatcngnaaatccatgcccgattcagaagaggagccagatcttaccaagtgatctgccaganatcaaaaancgcngatgatataccagcnacatnagtcatggtatgcgctctgtgcttanaagcaaccgggtggaatattgctgntgcaacagtggcagggcacantgccactcagtg

SEQ ID NO: 1573 - DNA, 566 bp, Homo sapiens
  misc_feature (1)...(566): n = A,T,C or G
catgtattgggaacggaaaaggagaattcaagtgtgaccctcatgaggcaacgtgttatgatgatgggaagacataccacgtaggagaacagtggcagaaggaatatnttggtgncatttggttctggnnatgctttggagggcaangggggtggggctttgnnaanatgnggaaaagatngggggggaaaaaagnnctgaaggggtaatggngagnagtaaaaanagtattttnaaanganccattaaaaaaaaaaacttntgntgatnngncaaaagagggggtgnngcntntttaaaganaangnggcagaaaaaaantnttnaggaaaaaanttttttnanaanangnaggannatggntttttttntgaaaaaattnanattggagnggagtgatgnaaacccaccnagaggnnnnttttttttttttaatnaagccctttggnnggggaggaanttnttnaggttnaattaaaattnntttntgnanaaaaaaaaaccctgggaatttngggggggttttaaaaaaaggggngggangaaaattgcttgtttggttnaaa

SEQ ID NO: 1574 - DNA, 462 bp, Homo sapiens
  misc_feature (1)...(462): n = A,T,C or G
gcgtccggttcctggnacttctaccngtgccctctgacnggcctcaccagaggtgccacctacaacatnatagtggnggcactgaangaccagcagaggcataaggttcgggaagaggntgttaccgtgggcaactctgtcaacgaaggcttgaaccaacctacggatgactcgtgctttgacccctacacagtttcccattatgccgntggagatgagngggaacgaatgtctgnatcaggctttaaactgntgtgccagtgcttangctttggaagtggncatttnanatgtgattcatntagatggtgccntgacaatgggngtgaactacangattgnagagaagtnggaccgncagngagaaaatggccagatgatgagctgcacatgtcttgggaacggaaaaggcagaattcaagtgtgaccctaatgaggcaacgtgttatgatgatgggaaga

SEQ ID NO: 1575 - DNA, 284 bp, Homo sapiens
  misc_feature (1)...(284): n = A,T,C or G
cgtccgngacaggcctaccagaggtgccacctacaacatcatagtggnggcactgaaagaccagcagaggcataangntcgggaagaggnatgttaccgtgggcanctntggcaacgaaggcttganccaacctactgntgactcgtgctttgacccctacacagttatccnattntgncnttggagatgagngggaacgaatgtctgnatcaggctttaaactgttgtgccagggnttaggctttggnagtggncatttcanatgtgattcatctagatggtg

SEQ ID NO: 1576 - DNA, 440 bp, Homo sapiens
  misc_feature (1)...(440): n = A,T,C or G
tctgaatacgctttaactgtngtgccggcgcttangctttggnagtggncatttnanangtgattnatntagatggtgccatgacaatggtgtgaactacaagattggagagaagtgncaccgnnaggnngaaantgnccngatganganctgcncatgtcttgggaacggaaaaggaganttcangtgtgaccctnatgangcaacgtgttacgatgatgggaagacatactcacgtaggagaacagaggcagaaggaatatntnggngncatttgntnctgcacatgctttgtaggccagnggngctggcnctgngacaactgncgcntacctggggnngaacccagtnccnaaggnactactngtcagtcntacaaccagtnttntcagagntaccatcagagaacaaacactaatgttaattgcccaatttgagtg

SEQ ID NO: 1577 - DNA, 369 bp, Homo sapiens
  misc_feature (1)...(369): n = A,T,C or G
gccgcaggctttaaactgttgtgncagggcttaggctttggaagtggtcatttcagatgtgattcatctagatggtgccatgacaatggtgtgnactgcaagattggagagaagtgggaccgtcagggagaaaatggccagatgatgagctgcacatgtcttgggaacggaaaaggagaattcaagtgtgaccnctnatgaggcaacgtgttacgatgatggtgaagacataccaccgtagngagaacagtggtcagnaagggaatatctcggatgcccaattttgcctcctgccacatgcttttgggagggcccaagccgggggcttggncgcctgttgaccaactggccgcnaagaacctggggggg

SEQ ID NO: 1578 - DNA, 406 bp, Homo sapiens
  misc_feature (1)...(406): n = A,T,C or G
cggccnctacaacatcatagnggaggcactgaaagaccagcagaggcataaggttcgggaagaggttgttaccgtgggcaactctgtcaacgnaggnttgaaccaacctacggatgactcgtgctttgacccctacacagtttcccattatgccgttggagatgagtgggaacgaatgtntcgaatcaggctttaaactgntgtgccagtgcttaggctttggaagtnggttcaatttcaagatcgttgatctcattctancatggatgccantgacaanngtgttgttgaacntacangtatttgttagaanananttggggacccggtncaggggnnggaaaaatngggcccaacantgnattgaagctttggcnacaatngttntttgnggnaaccgggaaaa

SEQ ID NO: 1579 - DNA, 219 bp, Homo sapiens
  misc_feature (1)...(219): n = A,T,C or G
ccgaggctaaaactggggtgccgtgcttaggctttggaagtggncnttncagatgngantcatntagntggagccangacaatggngtgaactncnagatnggagagaagtgggaccgtcagggagaaaanggncagatgatgagctgcacatgtnttgggaacggaaaaggngaattcaagtgtgaccctcatgaggcaacgngttacaatgatggga

SEQ ID NO: 1580 - DNA, 326 bp, Homo sapiens
  misc_feature (1)...(326): n = A,T,C or G
cggcgccagtgcttaggctttggaagtggtcatttcagatgtgattcatctagatggtgccatgacaatggtgtgaactacaagattggagagangnggggccgncagggagaaaatggccagatgatgagctgnacatgttttgggaacggaaaaggatgaattcaagtgtgaccctcatgaggcaacntgttcgatgatgggaanacataccacntagnagaacagtggctgaaggaatatctnggtgccattttgctnctgcacatgctttggaggccngcggggctgncgctgtgacaactgccgnagacctgggggtgaac

SEQ ID NO: 1581 - DNA, 499 bp, Homo sapiens
  misc_feature (1)...(499): n = A,T,C or G
ccacgcgtccggggtgttggtgcggcgctgttggggtcctccgctggctcatggcgccaggcgtgggaggccgagtccccagtggcgagcactggcccgactcggctgggaggactgccgggactccagagtccgcgaggcgctgcgggcgctgcacgccgccagggaaaacaaagaagaagagttaatcgacaaactggaggtggtcacaatgccttccccatcaccaaaaggactgccagtgaagcaatatgctgtgcagtctcagcttcccgtatatgagtggccggatgtgggatctggagaatatgatgttggagtagtggcttcgtttggccgacttttgaatgaggctcttattcttaaatttccctatggcatattgaatgtttcatcccagttgcctcccgagatggcgtggcccagcccctgtaatccatacagntgcttcacggagacacagttacntggagtaacaatttatgcaaattagacctaa

SEQ ID NO: 1582 - DNA, 917 bp, Homo sapiens
  misc_feature (1)...(917): n = A,T,C or G
cacccgtccggtgcggcgctgttggggtcctccgctggctcatggcgccaggcgtgggaggccgagtccccagtggcgagcactggcccgactcggctgggaggactgccgggactccagagtccgcgagaagcctccctggcgggtgctcttcttcggcacggaccagttcgcccgcgaggcgctgcgggcgctgcacgccgccagggaaaacaaagaagaagagttaatcgacaaactggaggtggtcacaatgccttccccatcaccaaaaggactgccagtgaagcaatatgctgtgcagtctcagcttcccgtatatgagtggccggatgtgggatctggagaatatgatgttggagtagtggcttcgtttggccgacttttgaatgaggctcttattcttaaatttccctatggcatattgaatgttcatcccagttgcctcccgagatggcgtggcccagcccctgtaatccatacagtgcttcacggagacacagttactggagtaacaattatgcaaattagacctaaaaggtttgatgtaggcccaattctcaaacaagaaactgttcctgtgccacccaagagcactgcaaaggaattggaagcagtgttgtcaagactgggtgccaacatgctcatttcagttttgaaaaatttgcctgaaagtctgagcaatggaatgcagcagccatatggaangggcgacttacgcccctaagatttctgctggtaccagttgtataaaatgggaggaactaacttcagaacaaatattcagactttaccgtgccattggaaatatagtaagttgggaagtcaggttgcagttctacctagttggtctttctatgtgtgtaatttgctttctcaatatttctatttaggaataatcccaaataaaaatatcc

SEQ ID NO: 1583 - DNA, 512 bp, Homo sapiens
  misc_feature (1)...(512): n = A,T,C or G
cgagccgcgaaccangcagtccggggcatccagactgcaggccgcgcccaggccgcgcccaggctgcgccgcccgcctgcctcccgcgctgccgcgtcgccagtgctagcgctcctctccagcatgctgcggcggggcagccaggcgctccggcgcttctccactggccgggtttatttcaaaaacaagctgaagttggcactaattggccagagcctctttggacaanaagtctatagccacctccgcaaagagggccaccgagtantaggggtgttcacagttccagacaaggatggaaaagctgaccctctggctttggctgcaganaaagatgggacccctgtgttcaagcttcctaaatggagggtcaagggcaagaccatcaaagaagtggcagaagcctacagatccgtgggtgcagaactaaatgtgctcctttctgcactcagttcatcccatggatataattgatatccaaagcacggtctatcatttatcacccatccatc

SEQ ID NO: 1584 - DNA, 453 bp, Homo sapiens
  misc_feature (1)...(453): n = A,T,C or G
cgcgtccgccgcgctgccgcgtccccagtgctaacgctcctctccagcatgctgcggcggggcagccaggcgctccggcgcttctccactggccggagtcttgctctgtcactcanactggagtgctgtggtgtgatctcggctcactgcaacctctgcctcccgggttcaaganattctcctgcctcagcctcctgagtagctgggattacaggtttatttcaaaaacaagctgaagtttggcactaattggccagagcctctttggacaaagaagtctatagccacctccgccaaagagggccacncgagtaagtaagggggtgttcacagttccaagacaaaggatgggaaaagcctgacccttcttggctnttggcttgcaagagaaagatgggaccccctggngttcaaagcttcctaaatgggaggggtcaaggggccaaggaccca

SEQ ID NO: 1585 - DNA, 799 bp, Homo sapiens
  misc_feature (1)...(799): n = A,T,C or G
gcggccgcaggtgtggtgggaagggcgttccaggagaaggagccacctggacacaggcttgcagtcatgaaacaatacgcaattatcactcccggcattctacatggccttgcctgagaccgggctggccaggatctctgggaaccaggaggaggggtctgcggcaccaggactgagtagaagggagagagtggagaaggggaattgcagagagaaaaccaggggctgtttttctctcggagaggcgggtaggcactgggcgggcagaagcgccgctatccacccggatgcgcagctgctaaggggccgcctctgcaagcggctgcaaattcccggagggcancgtctcctttcgctctgctgtgtccgtagcacatggcaggtacttggcccatcaagagtgagagagggtgagcgagtgagtgagtcaccggcttggcgagggtctcctctgacccacttagccttgccancgctcagaactgccaaccctgctgggtgcttgggacttttcaaanccctgggaattctccaagggtccacaatccttccaaccctcctgctaccatgaagattgcagtgattggacagancctgtttggccangaagtttactgccacctgaggaaggagggccncnaantggtgggtgtgttcactgttccanacaaggatggaaaggccgaccccctgggtctgganactgacaagatggagtgccggtattcnagtncccccggtggcgtgcnaaangancggcntngccngatggtggtggcaanatacangctttgggggg

SEQ ID NO: 1586 - DNA, 477 bp, Homo sapiens
  misc_feature (1)...(477): n = A,T,C or G
agcctcaacgagggctatgccaagtattttgatgctgctactgctgagtatgtacagaaaaagaaattcnccgaggatggcagtgagccttatggagccaggtacgtgggttccatggtggctgatgtgcatcgcaccttggtctatggaggaatcttcatgtacccagccaaccagaagagtcctaatggcaagctccggctcctgtatgaatgcaatcctgtggcctatatcatcgagcaagcaggaggtatggcaaccacaggcacccagccagtactggatgtgaaacctgagagtattcaccagcgagtccccctcattctggggtcccctgaggatgtgcaagagtatctcanctgtgtgcaanagaaaccaggcaggcaggtagtgagcctgaacccatgagcccgcttccctttgtctttgtcaattgaaaaactagatgaatgagctatggagatgggaaggaaaggc

SEQ ID NO: 1587 - DNA, 394 bp, Homo sapiens
  misc_feature (1)...(394): n = A,T,C or G
gngggagccatgcanagaggacagccggcctgcgccgggacatgcggncccaggagctccccaggctngggtncngggngctgctgaaagcngtngctgctgcngccgccgncgncgtgccntgcccacagcgccacgcgctangaccccacctgggagtccctggacgcccgccagctgcccgngtggnttgaccaggccaagancggcatnttcatncactggggagtgnntnccgngcccagcttcggnagcgagcggtnctggnggtattggcaaaaggaaaagataccgaagtatgtggaaattangaaaagataantaccctnctagtttcaaatatgaaaattttggaccactattttacaggcaaaaaattttttaaatgccaacc

SEQ ID NO: 1588 - DNA, 213 bp, Homo sapiens
  misc_feature (1)...(213): n = A,T,C or G
ggngctgcgagcgcggagggcgacgacgacnaagcgcanacagcgngatggcanancaggtggccctgagccggacccaggtgtgcgggatcctgngggaagagcttntncagggcgangccttncatcagnnggntacacacatattcatnatcatgggtgcatngggtgacctgnccaagangaagatctaccccaccatctggtggctgt

SEQ ID NO: 1589 - DNA, 269 bp, Homo sapiens
  misc_feature (1)...(269): n = A,T,C or G
attgaggtggagtagattacggcgtacggtacgaagtacgacggttaagggacgggtgatggtggctatgatggaggggatgctgagganaacnaattataagaatctggnggaattggtccttttgtnggaggcattgnttcacatggtcatatcnctttcaatgaagccttggatccagtttagtgtcaaggacaagattaaagactctatcaatggataccatcttgncaaatgccaaatatttttgatggagatttatnaaaagt

SEQ ID NO: 1590 - DNA, 404 bp, Homo sapiens
  misc_feature (1)...(404): n = A,T,C or G
ncggcngccaccagcannatcaacacacgttttanaaccganggttgtaaacnccacggacaggcancanccccangaaccgagnttnngggaccnangcgagcgatgccccngggggnccggcaccacccccncacccgggaggggagacagggngggnggagcncccggaaggggccggcccccagnnccaggcgagcggnccccaaccccaaggggccccccaaccngancaacaaaagcccagggggccgaagcnaggggaanggcgggggccggcggggagccccaacaacnnngcngggggccaagccaacaagagcaaagccggggccnggcnnngacccgaagagcggncaanggaagcccccaaacccgcaagggaacaancaaaggggccgggg

SEQ ID NO: 1591 - DNA, 299 bp, Homo sapiens
  misc_feature (1)...(299): n = A,T,C or G
gtttaaacgggtcgacccacgcctccggctgcataccgtggcccacagacgtggtcatttcccagatgctgtctttgagtcaaccttgcttctcagggactctcctgatgctgttggcatcaaacttcctnctgtggaanaatgtggcccctgtgcccatgtatgccagtttggatgaatatggtgagatgtccatatatgacctgcttgatcacgtcaccatactatctcataatgtcagtgagctcactgcagaaatgcacaggatatttatggaggatgtgcnatataaaccagtc

SEQ ID NO: 1592 - DNA, 329 bp, Homo sapiens
  misc_feature (1)...(329): n = A,T,C or G
cacncagggtcccgtggacagcgcaccnagcttttngtggcnacaggcanccggacgtccctgcnccaggcttagggccggcactgtcngccctggcatgaagagggcagngccttcccaaccantcccttagccaggcttattgacaacgcaaagcnncgngcccancgnctgcaccagcaggccntngacacntnccaggagcnagaagaagccgatacccnaaaggaacagaagnaaccatgccggcanaacccccagaccaccctgtgaaacncanaggctagagccgacaccctccaacagggaggaaacacaacagaaagcca

SEQ ID NO: 1593 - DNA, 445 bp, Homo sapiens
  misc_feature (1)...(445): n = A,T,C or G
gcaaancccgcaacgancaccgaacacgaacaananaggtttcgcnacggtaaaggnntaaacccngcngcngctggnggcaaaccggctcctgtgccagagcgcggcccccttgcccaacnggcccggcggggctgcccgangccaggcgaccctncgagacccgggggaccgcgccgcgnccggncccacaacanccaaaaccnccccaaanaaaggnccagngaanncaaaaaacggnanacccngggnggggggggnnaanaccaaggccaaaaacagnggccacactnnnncccgggccacccccnaagacaaggggcaagcccnacagangaancaaaaaggccnnccgagcccgaaagncaagcaaaaggcgancccggaaagagccccnggaacaaccgggncacggaaagaaccggggggaaggcaaaaaaacccc

SEQ ID NO: 1594 - DNA, 538 bp, Homo sapiens
tacctgatgaagaatttagtctttttgacctttgtaaattttcctattgcttacgtgtagatatacatatggttgaactttatctcaagctattagagtgtgtggtatatgttagtagtgatgtttgtttatccaaaaatattagagatgcttcaagaggctcccaccatcaccatcaccattgataatctagaacaaaaactcatctcagaagaggatctgaatagctgccgtcgaccatcatcatcatcatcattgagtttgtagccttagacatgactgttcctcagttcaagttgggcacttacgagaagaccggtcttgctagattctaatcaagaggatgtcagaatgccatttgcctgagagatgcaggcttcatttttgatacttttttatttgtaacctatatagtataggattttttttgtcattttgtttcttctcgtacgagcttgctcctgatcagcctatctcgcagctgatgaatatcttgtggtaggggtttgggaaaatcattcgagtttgatgtttttct

SEQ ID NO: 1595 - DNA, 1214 bp, Homo sapiens
  misc_feature (1)...(1214): n = A,T,C or G
aactcaatgatgatgatgatgatggtcnacggcgctacccagatccccttctgacctgagggttccagaagtccgggttctcctcctcaactgggatgatctctcatgaagcatctctaatatttttggataaacaaacatcactactaacatataccacacactctaatagcttgagataaagttcaaccatatgtatatctacacgtaagcaataggaaaatttacaaaggtcaaaaagactaaattcttcatcagatgattttaagtcttcaagaccagaaaagacggtgtattccacatttcctgttgttgttgttccataaatcgagttgagtatactctgggtgtactcaaaaagctctgcaagttttgtttcaatgtttttggctaatgaaatgacatcatcatgcattcctggaatacttctgagtgtggtcagtagaactttagaagtttcattccaagcccacattctactgaggatcagctttggaaattcgttaaaaggaatctgttgagcttcgtccaggttttctggagttttgatggaataattgtggcagcaggtgagagccttgaccagatactccatgtcctcaataaagtcaagcatatagttctcgtataatttttcagagacttgattgactgtatatgtcttgcgcagttccatgttgaggtttttgatattccaagttagtctcatggcattatgaaacagcccattgatggataatggataaccatcagtctcattgctactcaaaggtacgaattcnnnnnnnnnnnnnnnnnnnnnnnnnnnnnnnnnnnnnnnnnnnnnnnnnnnnnnnnnnnnnnnnnnnnnnnnnnnnnnnnnnnnnnnnnnnnnnnnnnnnnnnnnnnnnnnnnnnnnnnnnnnnnnnnnnnnnnnnnnnnnnnnnnnnnnnnnnnnnnnnnnnnnnnnnnnnnnnnnnnnnnnnnnnnnnnnnnnnnnnnnnnnnnnnnnnnnnnnnnnnnnnnnnnnnnnnnnnnnnnnnnnnnnnnnnnnnnnnnnnnnnnnnnncgtttcgaataattagttgttttttgttttctcaaatattccgctaaaataaataaaaatcaaaagcttgtcaattggaaccagtcgcaattatgaaagtaagctaataatgatgataaaaaaaaaggtttaagacagggcagcttccttctgtttatatattgct

SEQ ID NO: 1596 - DNA, 172 bp, Homo sapiens
  misc_feature (1)...(172): n = A,T,C or G
gccccgcgtccggccatcgaagcgccagcatcgcattccccggactgttggccaggagaagaagggttactttgaagatccgtgcccctctgccaactgcgaccccttttcggngacngaagcccttatccgcacgtgtnttttcaatgaanccggcnatgagcccttccag

SEQ ID NO: 1597 - DNA, 600 bp, Homo sapiens
  misc_feature (1)...(600): n = A,T,C or G
gctttggggnaaaacccccaaanccctcttcggatttacagncaaccgtncanaccacanctttttaanngcccagagaaaggagcgccagggattactacagnnaanatgcngctatctttctggtcacatngtcggggnagctgcatgatctncatnccgctcctgatgtgcagganngcccanaatgcaccgctacaggaaaacccantctttctcccagnncggggtgccccaatacttcagtgcatgggcngctgcttctctagagcataacccacnnccncttaanggccccaaanaangancnaagngtggggtccaaaanaaaccggcncccccncangaanggncnnccttggncngggggngancctaaaaancaanaaaaaccnaggggggtcaccaggcaanngggggggggtttttcaaaaagggggggaaaaaaaccaacaaccgggnggttccccancnnggcagggnaccnttgnntnancttttccncncaaaatntttaaaaaaanggggttttanancccaaaaggcnccgcgtcnttgggaannnaancnngngggggaatatttttgcgggaaaagggg

SEQ ID NO: 1598 - DNA, 1525 bp, Homo sapiens
  misc_feature (1)...(1525): n = A,T,C or G
ggtggcggccgaggtacttttttttttttttttttttttttgaggaggatactttcatttttattttatatcgtgaggtattgtttggattgttacaatgaacttgcatttcttttgtaatgaagaaaataatacagaggaaataacaacaactaaacctttggcctggattatcatcggctggaaattcatgttggatgcaagtttttattgataacaagttattttttgttttatatgcaaaaaatgttcattgaatgcctcctatttggctggcactgcctaggcactttcacaggtatttcatcctaatcctcacaacagccctatgaggtaatcattggtcccagtttacagaagccttgggtgggagattattgcttgatatacttctatttgccacacatttttgttggcaagacgttcgtatcggctggtgattcactggtcaagagctctcattggccaggagttcctatttgttgctgtaagattcaaataatcaaaatactagaatttttcccccacaagaatgatgggaccaatggcataagagtaaaggaaggagagtcagtgggtctctccctttgaagcaccatttgagtttgcattggtcagccccacacaggtgggcgggatgaggtggtggaggaggagacgcggtggttataagtcttctcgcttcagtaggatgagcttcctcacgagcgctgtgatctggggtctgacctcctccactgacacagttgggtcccaagcccctaccacctttccatctggggctactaggtacttccagaagttccaggtgggctccttcccagaagtctgggccaggtacttgaaggcaggatgggcaccagtaccggtgactgcaatcttgctaaacatggggaatgagacactgtaggtgcggcgggcaaagctctcaatctccttgttgctgtcaggctcctgttggccaaactggttgcaggggaaggcgagcacgttgaagtggtgggggcccaggtctcgctgcagctgctgcagggctcggtagtgctggtctgtgaagccgcactcgctggccacattcaccaccagggacaccgatccgcggtacttctccagcgacaccagtttgccccggatgttgaccgccttgaagtcgtagaagtcctgctcctgctgcgcgcaggccgcagcccacaggagcagccacgccgctgccaccgtcgccgccaccatggcttgttccggaggtggcggcgtcgcgagggcaaagacggggcggggggatctagcgcggggggcgggaggaggcggctctggcgccgctcggcccgcaaggcaggacgcgccgcgttctcgttccctccgcaggcggtggatgtccggctctggacctcagtttccccgtctgtcctgaggcagcgcacccctgccccggaccccagagccagggtttcaggattctgtcccctgagaccggagttcgtttcagtgaggctccctcttgtcccaggaaacagcgacnggcacg

SEQ ID NO: 1599 - DNA, 832 bp, Homo sapiens
  misc_feature (1)...(832): n = A,T,C or G
tttgagtcccaacatctccagtatgtgtgctgctcggctctccgcggcggcacagtccaccgtgtatgccttctccgcgcgcccgctgacgggggnaagcctgtgagcctgggctccctgcgggcaaggtgctgctcattgagaatgtcgcgtctctctgaggcaccacgatccgggactacaccgagatgaacgatctgcagaagcgtctgggacctcgtggactggtggtgctcggtttcccgtgcaatcagttcggacaccaggagaatggcaagaatgaagagattctgaattccctcaagtacgtccgacctggtggcgggttcgagcccaattttacattgtttgagaagtgcgaagtgaatggtgagaaggctcacccgctctttaccttcctgcggaatgccttgccaacacccagtgacgaccccactgcgctcatgaccgaccccaagtacatcatttggtctccggtgtgccgcaacgacattgcctggaactttgagaagttcctggtgggccccgacggtgttcccgtgcgcaggtacagccgccgctttcgtaccatcgacatcgaacctgacatagaaacccctntgtccaagcagtctggcaactcctaaggcggccctggcattggcttggtgattactggctgcactctggggggcggttcttccatgatggtgtttcctctaaatttgcacggagaaacacctgatttccaggaaaatcccctcagatgggcgctggtcccatccattcccgatgcctttccacctaatgaaaggtggtttcactactaagaataaagtgctgaatatcagaa

SEQ ID NO: 1600 - DNA, 464 bp, Homo sapiens
  misc_feature (1)...(464): n = A,T,C or G
gccacgcgtccggctgtgcggggctctggctgcgcctggtctggcaggcaccatgtgtgcatcccgcgatgattggcgctgtgcgcgctccatgcacgaattctcagccaaggacatcgacgggcacatggtctgcctggataagtacaggggtttcgtgtgcatcgtcaccaacgtggcctcgcaatgaggcaaaactgacgtaaactacactcagctagtcgatctgcatgcccgatatgctgagtgtggtttacgaatcctggccttcccctgcaaccagtttgngaggcaggagccaggaagtaatnaangaaatcaaggagtttgcagccggctacaacgtnaagtttggacatgtacagcaagatctgggtaaatggngncgatgcccacccactntnntaaatgggattgaaagtccagcccaagggcangggcatgctgggaaatgccatcaaatg

SEQ ID NO: 1601 - DNA, 235 bp, Homo sapiens
  misc_feature (1)...(235): n = A,T,C or G
tccgggcttanacgtgctctctggagcgnggncagctactgaggcctgacggnccantacattganctgantgcnctacaggangagcttgcangattcggtctggtcattctgggctttccctgcnaccaatttggaaaacaggaaccaggagagaactcagagatccttnctaccntcaagtatgtncgaccaggtggnggctttgtccctaatttcagctnttttgagaaag

SEQ ID NO: 1602 - DNA, 175 bp, Homo sapiens
  misc_feature (1)...(175): n = A,T,C or G
gcgtccggtccgtctgaggcaccacggtncgggactacacccacgatgaaccgagctgcancggnncctnggaccccggggccnggtggtgctcggnttaccgtgcanccaggtngggcatnaggagaacgccaagaacgaagagattntgaattccctcaagtacgtccggcct

SEQ ID NO: 1603 - DNA, 590 bp, Homo sapiens
  misc_feature (1)...(590): n = A,T,C or G
cgggaccatgtgcncgtcccgggggggactggcgctgtgcgcactccatgcacgagttttccgncaaggacatcnacgggcacatggttaacctggacaantaccgnggcttcgngtgcatcgngcaccaacgtggcctcccantgaggcaagaccnaagtaaactacactcagctngtnancntncacccnctntnacgcttgantgtggtttgnggatcctggccttcccgtgntaaccagnttctggtaagttaggaaccagagggagtaacgatnnagatcaaaggagttcgccgcggggcttacaacngttcnaaattcctactatggtttcaagccaaagatcttgcgttgaaccggggggactgaacccnccaaccccgcttgggngaangtggattgaaaagaatccnaccccaaagggngccnngcgggncaatttgctgnnggaattgcncncnccnnaggtgggnaaacttttccacgcaaaagntnttcacnttcaattcnnnacnaaanaanaccgggcttngcnggttggntggaaaagccggcnttncngcggaacccccaantggggaagggga

SEQ ID NO: 1604 - DNA, 170 bp, Homo sapiens
  misc_feature (1)...(170): n = A,T,C or G
ctgaatgcactaccggaaagaagcttgcaccattnggnctggtcattctgggcttngcctgcaaccaatnnggaaancagggaccaggagagaactcanagatccttcctaccctnaagtatgtccgaccaggtggaggctntgtccntaattnccagctctnggagaaa

SEQ ID NO: 1605 - DNA, 445 bp, Homo sapiens
  misc_feature (1)...(445): n = A,T,C or G
gcggttgggaccctgtcacgtatcctgaaaactggagggccttcaaggctctcatcgctgctcagnacagnggggctcaggtccgngtgctgtccgnaccaccnnanttccattnnggccaaaccaaccgnacncctgaatttntncgcaaatnncctgccggcaaggtcccagcattngagggtgatgatggatnctnngtgtttgagagcaactccattgnctactatgtgagcaatgatganctgcagggaagtactccagaggcagnagnccacgtggtgcagaggntgagctnngctgatnncgatntantgccctcanccagtacctgcnnnttncnnaccttgggcatcatgcaccacaccaaacaggccactgngaatgcaaaggaggaagtnantgcgaattctggagctgcngnatgcttacttgaagacgagga

SEQ ID NO: 1606 - DNA, 326 bp, Homo sapiens
  misc_feature (1)...(326): n = A,T,C or G
ccccgcgtccgaggcacttgaggagctgggacccagccgttcctgctcgccgttgcggctgctccggcttctgtccccagaggcagttcacccgaggctagntcccgaggtctgccagcggctactcccacagcctccgccatgggtctggagctctacctggacctgatgtcccaaccctgccgtgctgtctacatcttcaccaanaagaacggnatncncttccagntgcgtaccatagagntgcttaaaggtcaacagtacacanattccttcgcccangtgaaccctttgaggaaggtgccagctttgaaggatggggactt

SEQ ID NO: 1607 - DNA, 406 bp, Homo sapiens
  misc_feature (1)...(406): n = A,T,C or G
acacgtatnctgaaaactggngggccttcaaggctctnatngctgctnannacannggngctcangtncgcgtgctctccgcaccaccccacttncattttggccaaaccaaccgcacccntgantntntccgcaaattnnctgncggcaaggtnccagcatttgagggtgatgatggattctgtgtgtttganagcaacgccattgcctactatgtgagcaatgagnanctgtggggaagtactccagangcancagcccaggnggtgcagtgggtgagcttngctgatnccnntatagggccccnagccngtacctgngngttncccancttgggcntcatgcaccacaacaaacaggccantgataatgcaaaggaggaagtgaggccgaattctggggctgn

SEQ ID NO: 1608 - DNA, 304 bp, Homo sapiens
  misc_feature (1)...(304): n = A,T,C or G
cgcgtccgggttgaaactgaattgcaaangaagaaatgaacgaaaccccagaagagggccagcaaccttggctctgcggtgaatccttcaccctggcagacgtctcactcgctgtcacattgcatcgactgaagttcctggggtttgcaaggagaaactgtggaaacggaaagcgaccaaacttggaaacctattacgagcgtgtnttgnagagaaaaacatttaacaacggttttaggacatgtcaacaatatattaatctctgcagtgctgccaacagcattccgggtggccaagaaaaggg

SEQ ID NO: 1609 - DNA, 495 bp, Homo sapiens
  misc_feature (1)...(495): n = A,T,C or G
gacggcgggcggctgtccttgccaacagtgggncacctactcngacacngagttaataccanctgccngtggagcaacgctgccacccctgggactacgaagctgggcccaggacccccaggctgtgctgggggccctgggcagngccctgaccccttggaggagtggntnnagntncacacctacttgnccggggaggccctaactctggctgacctggcggctgtcacagactttgctgctgcctntaacgataacggtcctagacccacctgcaccgcacgganctggaaaaaatnagacncnntggntnganacgnntgnccggcaacccagaaannncgaancngtactangaaganggtgggnncctanacttnagganccangctccngtctctcattcaaaacaaggcccccgnaggcatcccntggccctgcccaaaggacaagcctggtttcaccttcaaagaaaagnagagcnaaatgaaaaac

SEQ ID NO: 1610 - DNA, 262 bp, Homo sapiens
  misc_feature (1)...(262): n = A,T,C or G
aatnggggaaaacccnnnngggggggaaacntnggnanatattcntnaaactgtanggcctttaaggctctcatcgctgctcagtaacaggggggcttnttnnnntnatgnnatnnncaccancacactnccattatggncaaancaaccgcaccccttgaattttctccgnaaattatcctgncggcaaggtcccancatttnagggtgatgatggattctgtgtgtttgagagcaacgccattgcctactatgtnagcaa

SEQ ID NO: 1611 - DNA, 557 bp, Homo sapiens
  misc_feature (1)...(557): n = A,T,C or G
cacncgtccgcccacgcgtncgggcggntgggaccctgtacacgtatcctgaaaactggagggcctccaaggctctcatcgctgctcagtacagnggggctcaggtncgcgtgctntncgcaccaccccacttccattttggccaaaccaaccgcacccctgaatttctccgcgaaatttcctgccgncaaggncccancatttganggtgatgatggatgtcctgtgtgtttgagagcaacagcccattgctctactatgtgagcaantgaggagcctgcggggcaaggtacttccaagagggnagcaagcccaaagttggtgccagatgngggtgagcctttggctggatttcccggattatangttgcccccccagccaggtaccctgngggtgtttccccacctttggggcatcatggcacccaccaaccaaaaacagggtcccacttgnnaggaaaatggcnanacggnaaggaaggtngnagggccgaaatttcttggggagcttggcttgggattggcctttaacttttgaaagaacctaagggaccttt

SEQ ID NO: 1612 - DNA, 467 bp, Homo sapiens
  misc_feature (1)...(467): n = A,T,C or G
cgaattggagctccccgcggtggcggccgccgnncaggtacctgggtgttccccaccttgggcatcatgcaccacancanacaggccactganaatgcaaaggaggaagtgangcnaattctggggctggnggatgcttacttgaagacgaggacttttctggtgggcnaacnagtggcatnggctgacatnacagttgtctgcaccctgttgnggctctataancaggttctnnagccttntttcccgcaggccttttccaataccancccctggntcctacctgcattaaccaaccccagtttccggctgtcttgggccaaangaaactgtgngaaaangaatggcccaanttgatgctaaaaagtttgcagaagacccacctaaannggacacaccacggaaagagaagggttcacnggaagagaagcataagccccaggctgatccnganggangaaaaaaag

SEQ ID NO: 1613 - DNA, 404 bp, Homo sapiens
  misc_feature (1)...(404): n = A,T,C or G
gnccggcttttgggncanngccacgtancctgaaaactggtnggccttcaaggttctnaaccgcngnttnntacaccggggctcaggtccgcgtgctcgccgcaccaccccacttccatngtggccaaaccaaccgcacccctgaatntctccgcaaatntcctgccggcaaggncccagcatttgagggtgatgatggattctgcgtgtntgagagcaacgccattgcctactatgngagcaatgaggagctgcggggaagtactccagaggcagcagcccaggtgggtgcagngggngagctttgctgattccgatatagngcccccagccagnactggggggcnccccaccttgggcatcatgcaccacaacaaacaggccactgaggaatgcaaaggagg

SEQ ID NO: 1614 - DNA, 759 bp, Homo sapiens
  misc_feature (1)...(759): n = A,T,C or G
tttggttgttccagttctttattaggcaaagaacagttgtttttttgtttttttgttttttttttttaacatttcctttaaggaaggtggctcagattgctaagccagccaggccctgcgggacaggctgcgcctagggtcacctgctcttcttcagcaactcagaaatattctccttgaccattgaatccaatgttgaaaagtcccagtcggccaactgcattagtcgatcatgggcctccctaaagaggccagagccaatattcagctccacctgcatacgccactcagctagcttggagctgttgaggaagacattatagttggctgccatgggctgcatcatctccaccacggccaccaggtcagccagtgagatttggttcccggtgatgaacatcttatcctgcagaaaatactcctcaaagagctgcaggctgttcttcacctcttccactgcatgctccatcttctcagctgaaacttcctcccctgttatctttgggatcagcaactttcacttaagataaatttcccatctttgaggctgggcagcttcctgagggggttgatgtcaatgtattctttgctgtggtggtgacctttcagcagatccacaaactgaaagttgaactggatgtcatgcttcttcgagaagatgtanncggcacggcagggtggcgcttccaattaggtgcatgagtaggtggcctgcagtaatgttagcggttaggcgtacggccagggctattggngaat

SEQ ID NO: 1615 - DNA, 829 bp, Homo sapiens
  misc_feature (1)...(829): n = A,T,C or G
tcttttttttttttttttttgttggtccagttctttattaggcaaaaaacacttgtttttttagcatttcctttaaggaagggggctcaaatcattgagccagccaggccctgcaggatgggctgcgattagggtcacaagtacttctcccgaaactcacagattttcctcgtgaccattggatccaatgttgaaaagtcccagtcggccaactgcattagtcgatcatgggcctccctaaagaggccacagccaatattcagctccacccgcatacgccactcagctagcttggagctgttgaggaagacattatagttggctgccatgggctgcatcatctccaccacggccaccaggtcagccagtgagatttggttcccggtgatgaacatctttatcctgcagaaaatactcctcaaagagctgcaggctgttcttcacctcttccactgcatgctacatcttctcagctgaaacttcctcccctgttatcttttggatcagcaactttcacttaagataaatttcccatctttgaggctgggcagcttcctgagggggttnatgtcaatgtattctntgctgtggtggtgacctttcagcagatccacaaactgaaagttgaactggatgtcatgcttcttcgagaagatgtagacggcacggcagggtgctgacagcaggtccatgtagagctccagggccatgttgagacacatgccaggccccacagctgcagctagccagccacagacctgggcctatgtctggccagagtccctggccctgtgccctctccgatctagaactagtccggacgcggggc

SEQ ID NO: 1616 - DNA, 1977 bp, Homo sapiens
gcgtccgggagcccagcataaggaccgagcagcctggcaccccactttgccatcctctccctggaaatctcggggtcggcgggccggccgcttcgcgtgggcgaaatcagagacacgtggtttccaaggccccttcgggttcgggaaaattttatggttcgggtcacactagtaagcggacaatgaggcgggagggcagagagaaccgcaacaccgccgcgcacctggtgccgggtcgggtcgtttccggggctttcagtggccggaagtcgcggcgcctgtactgactctaggaagggctggagttgttttgaatgggcgcccgtaagagaggtgggcaagtacgtgttacagacggccacgccgccctttaggcggtcaaggtggggcgagcagacgttcgcccccctgcagtcggccgggtcactacccaagagcctttggaggcggaagcatggaacggtctgcaaacgttcccgagcgggcctctgcggctctggcgggcgtttcgaacttgggcgccgggcacacgcccagtcccgagagcgctgagggttcccttagcgttgccctcaccccggccaacccgcggggcgccagagtcctggccctttaaacgccgcgcgtgcctcggcgtcttcgtttcgcgcgcccgcccgcggcgccggcggatcccgcatggacccggctgcgcgggtggtgcgggcgctgtggcctggtgggtgcgccttggcctggaggctgggaggccgcccccagccgctgctacccacgcagagccgggctggcttcgcgggggcggcgggcggcccgagccccgtggctgcagctcgtaaggggagcccgcggctgctgggagctgcggcgctggccctggggggagccctggggctgtaccacacggcgcggtggcacctgcgcgcccaggacctccacgcagagcgctcagccgcgcagctctccctgtccagccgcctgcagctgaccctgtaccagtacaagacgtgtcccttctgcagcaaggtccgagccttcctcgacttccatgccctgccctaccaggtggtggaggtgaaccctgtgcgcagggctgagatcaagttctcctcctacagaaaggtgcccatcctggtggcccaggaaggagaaagctcgcaacaactaaatgactcctctgtcatcatcagcgccctcaagacctacctggtgtcggggcagcccctggaagagatcatcacctactacccagccatgaaggctgtgaacgagcagggcaaggaggtgaccgagttcggcaataagtactggctcatgctcaacgagaaggaggcccagcaagtgtatggtgggaaggaggccaggacggaggagatgaagtggcggcagtgggcggacgactggctggtgcacctgatctcccccaatgtgtaccgcacgcccaccgaggctctggcgtcctttgactacattgtccgcgagggcaagttcggagccgtggagggtgccgtggccaagtacatgggtgcagcggccatgtacctcatcagcaagcgactcaagagcaggcaccgcctccaggacaacgtgcgcgaggacctctatgaggctgctgacaagtgggtggctgctgtgggcaaggaccggcccttcatggggggccagaagccgaatctcgctgatttggcggtgtatggcgtgctgcgtgtgatggaggggctggatgcattcgatgacctgatgcagcacacgcacatccagccctggtacctgcgggtggagagggccatcaccgaggcctccccagcgcactgaatgtccccgcgcagagcatagggaaggcagcggaagacgccagctgccagggcctggggccactgggccagcgcctggcgatactggttgggggcaggatcattctgccccttgtccacgcacccccaccagccctctcgcttctaacacagggcacctgctggg

SEQ ID NO: 1617 - DNA, 953 bp, Homo sapiens
ttttttttttttttttttacatttcctgttttcattttattgggaacttcaaagaaaagaaagagagacggattggttcccaagacaagccgtgacgtagactcccaacaagctggggaattctggacagcgaaggggtggacagtgagactcagcacagcccaaagtcaaaggcattagggttgttctgaaaatagagattcaagaagccctggaaaatgctcttatccatgagaagagcacagactgtggggtcccacttcatggctgatatccagagccgcagggctggcgtgtggctcacacagtccagtatcccatacacatccagccgctcaaaccagggccagaggaggtaatcaatcatggatatacaggttccaccaaagaaggtggtgttctgatactcaagaatctcttccaggttgctgaattcctgacgcagggctgccttcagattagtgcattctctcccacatctcaacgctaccaggcactccttggtcaaatgtgggaccttacaaaatagctccaataacatcttttggcgagctcgttcataagggtcatatggaaacagcttccttcctggataagcatcatccaggtactcacaagcaataacagattcatagatcagttgacattggctggtctccaggacaggaatgtggccaaaagggtgctttgtatagtaccattcaggcttgtttctcaggttaatgttgaccacttcatgtctgatgtctttggccttgaggacgaggcgggtcctgtgagaataggggcagaacctcatgctgtagatgcggatcagcccctccgggactggccctgggggctggcttcctgcagagcagcgatggagggggacagggaaaggagaggctagtcagcccggtgaggaaggagctcgctcacacgcccagatcccaagatggctgcggacgcgt

SEQ ID NO: 1618 - DNA, 770 bp, Homo sapiens
gcgtcccccctgtccccctccatcgctgctctgcaggaagccagcccccagggccagtcccggaggggctgatccgcatctacagcatgaggttctgcccctattctcacaggacccgcctcgtcctcaaggccaaagacatcagacatgaagtggtcaacattaacctgagaaacaagcctgaatggtactatacaaagcacccttttggccacattcctgtcctggagaccagccaatgtcaactgatctatgaatctgttattgcttgtgagtacctggatgatgcttatccaggaaggaagctgtttccatatgacccttatgaacgagctcgccaaaagatgttattggagctattttgtaagattcttgagtatcagaacaccaccttctttggtggaacctgtatatccatgattgattacctcctctggccctggtttgagcggctggatgtgtatgggatactggactgtgtgagccacacgccagccctgcggctctggatatcagccatgaagtgggaccccacagtctgtgctcttctcatggataagagcattttccagggcttcttgaatctctattttcagaacaaccctaatgcctttgactttgggctgtgctgagtctcactgtccaccccttcgctgtccagaattccccagcttgttgggagtctacgtcacggcttgtcttgggaaccaatccgtctctctttcttttctttgaagttcccaataaaatgaaaacaggaaatgtaaaaa

SEQ ID NO: 1619 - DNA, 512 bp, Homo sapiens
  misc_feature (1)...(512): n = A,T,C or G
cgtccggccgccgcgccggagcctccttctttcctgcctctgattccgggctgtcatggcgacccccaacantctgacccccaccaactgcagctggtggcccatctccgcgctggagagcgatgcggccaagccagcggaggcccccgacgctcccgaggcggccagccccgcccattggcccagggagagcctggttctgtaccactggacccagtccttcagctcgcagaaggtgcggctggtgatcgccgagaagggcctggtgtgcgaggagcgggacgtgagcctgccacagagcgagcacaaggagccctggttcatgcggctcaacctgggcgaggaggtgcccgtcatcatccaccgcgacaacatcatcagtgactatgaccagatcattgactatgtggagcgcaccttcacaggaggacatttagccaatgccaccacggacctcatgaaactggaccatgaagaggagccccagctnttccgagccttaccttttaaac

SEQ ID NO: 1620 - DNA, 1407 bp, Homo sapiens
atgaatgaggaactggacacccacaaggtgctggtcagaagaggagaaatgaatatttacctagagaggagtggtcaccacctgaaccccatgatcaagcttggcattattagtagtaggacagttagacaccagatgatgagccgaatctcagggaggaagactgagaggcaggaaagcgttgatgagggtggaatctttggcaggtgcctggcccaatacactgagctgtttggggggcacgacccacttcctcgggctccttccacccttgcagggagcctgacactgagggctggcggcttttctggcgcgggccagggggaggaggagaaaggagctcccgggatcccctcgccccctcccccaactgcccgctggtggcccatctccgcgctggagagcgatgcggccaagccagcggaggcccccgacgctcccgaggcggccagccccgcccattggcccagggagagcctggttctgtaccactggacccagtccttcagctcgcagaaggtgcggctggtgatcgccgagaagggcctggtgtgcgaggagcgggacgtgagcctgccacagagcgagcacaaggagccctggttcatgcggctcaacctgggcgaggaggtgcccgtcatcatccaccgcgacaacatcatcagtgactatgaccagatcattgactatgtggagcgcaccttcacaggagccaagcccgagcatgggggtgcccagggcctctgggcagagacatcttggggctcagggatgccgggggcaggtggccggggcaggtgcccctctggcttccctgcccagcccctggcggtgcccacagagcacgtggtggccctgatgcccgaggtgggcagcctgcagcacgcacgggtgctgcagtaccgggagctgctggacgcactgcccatggatgcctacacgcatggctgcatcctgcatcccgagctcaccaccgactccatgatccccaagtacgccacggccgagatccgcagacatttagccaatgccaccacggacctcatgaaactggaccatgaagaggagccccagctctccgagccctacctttctaaacaaaagaagctcatggccaagatcttggagcatgatgatgtgagctacctgaagaagatcctcggggaactggccatggtgctggaccagattgaggcggagctggagaagaggaagctggagaacgaggctgggcctctaaacttggacatgccagcttcattctacctccatgcttttgctcccacagcccctccctcctggagcacccttcctacaccactccactccattttgcctgttgcacaccatctttgccacagcccttcttcaaatctcattctgagcttcccatcttgctccgtttaa

SEQ ID NO: 1621 - DNA, 1227 bp, Homo sapiens
  misc_feature (1)...(1227): n = A,T,C or G
ttttttttttttttgtcagacaccaagccccaggcctggccctagatgtattttttcttgaggtaccagtaggcaaagtagcccatcccacccagggagcccatgaggaaggacgccccgaagaaggatgggggtttcctcttgaccagccggaaagcattggggatgacggccgacagcagggtggtgtggatgtcacccaggactttccggaaggcaaagcgtctctggaccctctcaaagaaggactgcaggttgggccggctgccatcttcccagtatttcttggacagtcccaggaacttgaggcggtgcagggtggctcccaggaggacatcagcgagggtgaaggcacagccacagagccacagctcgcatttctgcccctcgttctccagcttcctcttctccagctccgccttcaatctggtccagcaccatggccagttccccganaatcttcttcaggtagctcacatcatcatgctcccaagatcttggccatgagcttcttttgtttagaaaggtaggctcgaaanctggggctcctcttcatggtccagtttcatgaggtccgtggtggcattggctaaatgtctgcggatctcggccgtggcgtacttggggatcatggagtcggtggtgagctcgggatgcaggatgcagccatgcgtgtaggcatccatgggcagtgcgtccagcagctcccggttactgcagcacccgtgcgtgctgcaggctgcccacctcgggcatcagggccaccacgtgctctcctgtgaaggtgcgctccacatagtcaatgatctggtcatagtcactgatgatgttgtcgcggtggatgatgacgggcacctcctcgcccaggttgagccgcatgaaccagggctccttgtgctcgctctgtggcaggctcacgtcccgctcctcgcacaccaggcccttctcggcgatcaccagccgcaccttctgcgagctgaaggactgggtccagtggtacagaaccaggctctccctgggccaatgggcggggctggccgcctcgggagcgtcgggggcctccgctggcttggccgcatcgctctccagcgcggagatgggccaccagctgcagttggtgggggtcagattgttgggggtcgccatgacagcccggaatcagaggcaggaaagaaggaggctcccggcgcggcggctctctctcgcccagcatggggggggggggat

SEQ ID NO: 1622 - DNA, 443 bp, Homo sapiens
  misc_feature (1)...(443): n = A,T,C or G
tgaaatttctccgcaantttcctgccggcaaggtcccagcatttgagggtgacnatggattctgtgtgtttgagagcaacgccattgcctactatgtgagcaatgaggagctgcggggaaagtactccagaggcatcagcccaggtggtgcagtgggtgagcattgctgattccgatatagtgcccccagccagtacctgggtgttccccaccttgggcatcntgcaccacancaaacaggccactganaatgcnaaggangaagtgaggcgaattctggggctgctggatgcttacttgaagacgangacttttctggtgggcgaacgaagtgacnttggctgacatcacngttgtctgctccctgttgtggctctataancatgttctagagccttctttctggccagngcctttcccaattccaaccgctggttcctcac

SEQ ID NO: 1623 - DNA, 506 bp, Homo sapiens
  misc_feature (1)...(506): n = A,T,C or G
aaccccgggcggctntnaccctgtacacgcntcctgaaaactggagggccttcaaggctctcatcgctgctcagtacagctgngctcaggtccgcgtgctctccgcaccaccnnacttccattttggccaaaccaaccgcacccctgaatttctccgcaaatttcctgccggcaaggtcccagnattttgangggtgnatgantggattctgtgtgtttgagaagcaaacngccattgcctactattgtgaagcaatgaggagcttgctggggaagtacttccagaggcagcanctccanggtggtgcagtgggtgagcttttgctgattccgatatangtgcccccagccagtacctgggtgttccccaaccttngggcattcatgcacccacaacaaacaaggccacttgangaaatgcaaaaggaanggaangtgagngctganattcttggnggcttgcttggatgccttaacttgaanacnangacttttctgggtggggc

SEQ ID NO: 1624 - DNA, 566 bp, Homo sapiens
ctatagggagtcgccccgcgtccgattttacatccattttaatgtgcactgggacagaaacgacacaaacttaattcctaatggaagtagcataactgtcaaccagactaacaagagagactatgtttctaagtatatcaattacattttcaaccgactctgtaaaggcggtttatgaagaatttcggagaggattttataaaatgtgcgacgaagacattatcaaattattccaccccgaagaactgaaggatgtgattgttggaaatacagattatgattggaaaacatttgaaaaggtacatcatcaagtctaagttgattaaattcagttttccttcctatttcctcaataactttttttttgtattttctctagaatgcacgttatgaaccaggatataacagttcacatcccaccatagtgatgttttggaaggctttccacaaattgactctggaagaaaagaaaaaattccttgtatttcttacaggaactgacagactacaaatgaaagatttaaataatatgaaaataacattttgctgtcctggaaagttggaat

SEQ ID NO: 1625 - DNA, 192 bp, Homo sapiens
gctgctgatgacattggagatgcgctctgcatacgcttttctatacactgggaccaaaatgatgttgacttaattccaaatgggatctccatacctgtggaccaaaccaacaagagagactatgtttctaagtatattgattacattttcaacgtctctgtaaaagcagtttatgaggaatttcagagagga

SEQ ID NO: 1626 - DNA, 404 bp, Homo sapiens
  misc_feature (1)...(404): n = A,T,C or G
ggttgtcgaccccgcgtccgaattatttntagtgttncccgcntcgctnnttacctttcatttctaagtgcnnatacnnaccaatcatgactaananggtttctgntgtgnnttcctcccaccttttccanctttgccnaagtcatgcntgagacngngaangacctggctcccgaaatgtgangtgtntttcctgcantcngaggatggcnnngggaagggggcggngctcatcactgctgnggnctgccgcattcgatgaggctggacagcagatagaacccctgaaatnggaagggacttnctctntntctccttcttccctgttttaaattataagatgtcatccccttgtgtcagagacagacccctnggctttngcttggcaganaggaccccactgg

SEQ ID NO: 1627 - DNA, 233 bp, Homo sapiens
  misc_feature (1)...(233): n = A,T,C or G
tccgcggggatccctcaaccctggaaaacagctgtttgagaagatggtnagtggcatgtacttgggagagcctggttcgactgatcctagtcaagatggccaaggagggccntttatttgaagggcggatcaccccggagctgctcacccgagggaagtttaacaccagtgatnctgtttaccccattngaaaagaataaaggtaaggccctncacaatnccaaaggaaatcc

SEQ ID NO: 1628 - DNA, 532 bp, Homo sapiens
  misc_feature (1)...(532): n = A,T,C or G
cttagggttgctggcaggtggaagaaaccctgagttgctctgaggagggcttgccccgggccctcagacagctcaaagctggngnnggagtgcctgcagcaagttcaaggtgacaaggcacagtcagcagatcaaccanctttgggttccatggagcaggcgctgaggggacaggccagcccttgccctgcngtccggatgcttgactacatacgtggggtccaccccacatggcactgacaaggagacttcgnggngctggagctgngggccacagggcctcactgcgtgttttgtgggtgactctactgcattgaggggcatacggtggagcccanaatcnaagantttgtgatcnctcaagaagtgatgcttgggtgctggccaacagctcttttgactttgcttgcccactggccttgcttgagntcctggatgcgcagcctgtgaacaaacanggtctgcagcttggcttcancttctctttcccttggcacaaacggcttnggacaggagcaccctnatttccttg

SEQ ID NO: 1629 - DNA, 342 bp, Homo sapiens
  misc_feature (1)...(342): n = A,T,C or G
cgacccacgcgtcctttggttttaggacgcagtggngtggaaggccaggatgnggtccagctgtttnnagatgccattcnnaggcagggggcctacaacatccgacgtggttgctgaggtgaacgacacagtgggcaccatgatgggctgtnanccgggggtcagagccgtgtgaggttgggctagttgtanacacagggcaccaacgcttgttacatggacgaggtacggnatgtggcagngctggacgaacaccggtaccgcntntgcgtcagcgtccagnggggctccttcanngatcatggggccctnggaccagtagctgaccaccttcgaccatac

SEQ ID NO: 1630 - DNA, 648 bp, Homo sapiens
  misc_feature (1)...(648): n = A,T,C or G
ttggctgcgccacggcggcgggcggtccgtgggcgcacacaccctccccgcgcagccaatgggcgtgcgcacgtcactgatccggaggcccgcgggccggcagcccctcaataagacacaatcttccatgaaactccggcgcaggagtcccgggctgccgctggcaacatcgtgtcacccagctaagaaaatccgcgggcccgagccacgcgcctgtgaatcggagaggtcccactgcccgagtggagccgggctgagattcttctcaagttgagcctcagtgatcctgtggccgaagttagcgccttgacgtgggacaaccggacacgtcgccaggagagaactgaggcgccttctagcagttgtgacgccaaaatcacgtctccggagacccgcgccctccgccagccgggcgcaccctcgccggtagccttctttgtgcgccgtccggactcccagctcccggcccggcagccgagccccagcacaaagcagtcggaccgcgccgcccgcctnccctctcgcgtctccgctcggtttcccaactctgcgccgtcgggccgcggcaggatgattgcctcgcatctgcttgcctacttcttcacggagctcaaaccatgacaagtgcaggaggttgaccagtatctc

SEQ ID NO: 1631 - DNA, 479 bp, Homo sapiens
  misc_feature (1)...(479): n = A,T,C or G
cgtccggaagcgtgcaacactccagagtcgtaggagtgaacactgcacacggaatctctgcccatctcaggagaaaccaaacttggggaaaatgtttgcggtccacttgatggcattttacttcagcaagctgaaggaggaccagatcaagaaggtggacaggttcctgtatcacatgcggctctccgatgacacccttttggacatcatgaggcggttccgggctgagatggagaagggcctggcaaaggacaccaaccccacggctgcagtgaagatgttgcccaccttcgtcagggccattcccgatggttccggagtttgacctgnacattgttgcagtcgtgaatgatacagtggggaccatgatgacctgtggctatgaagatcctaattgtgagattggcctgattgcaggaacaggcagcancatgtgctacatggaggacatgangaacatcgagatggnggaggggggt

SEQ ID NO: 1632 - DNA, 445 bp, Homo sapiens
tcctccatgtatccgacccacgcgtccgcgatgacacccttttggacatcatgaggcggttccgggctgagatggagaagggcctggcaaagggcaccaaccccacggctgcagtgaagatgttgcccaccttcgtcagggccattcccgatggttccgaaaatggggagttcctttccctggatctcggagggtccaagttccgagtgctgaaggtgcaagtcgctgaagaggggaagcgacacgtgcagatggagagtcagttctacccaacgcccaatgaaatcatccgcgggaacggcatagagctgtttgaatatgtagctgactgtctggcagatttcatgaagaccaaagatttaaagcataagaaattgccccttggcctaactttttctttcccctgtcgacagactaaactggaagagggtgtcctactttcgtg

SEQ ID NO: 1633 - DNA, 375 bp, Homo sapiens
  misc_feature (1)...(375): n = A,T,C or G
gattcagtagtgaattctggacaaagaatattttctaggtggcattgagttgnctggctgtctctctttcttttaggatgttatcagtcattgatgcatattgcctggatctattatttcactagacatcgtaaatggtgatgattcctgcagttattagctggaatacttctagaaagaggaactttcccctatcaactctttggtcgatcggctggcccttctccaggtcaggaggattctgcagcagctgggcctggacagcacgtgtgaggacagcatccgtggtgaagggaggtgtgcggagccgtgtcccggcgggcggcccagctcttgcggtgctggcctggccgctatagtggaaaaaaggagaga

SEQ ID NO: 1634 - DNA, 1031 bp, Homo sapiens
  misc_feature (1)...(1031): n = A,T,C or G
taagcttgcggccgcttaattaaagatcttttttttttttttttttttattggaaaatcaaaatttttttattaatttactggatttcctatacctaacaatccttaaaacaactatcaacagctgcaacacaaaccacaggcaaaatgaaaaacagatgccccagacagcaccccaccacatggcacacacttaataaggaacaaaatcctacagggtgctgacataactcgctttaagcatgcaatgattcctgcagtgctccctggcaatcaacctctctgcaccctggggctggatacttcaaagtctttgttctcttaacaggtttgaagtcaacatggcaagttaaggacaagttagatgagatccccctagttcataacgtgagttcctcttgctctccaatgttcatccacaagtacagggtccaatcccctataagagatggcttaagcatcccaatggggaaacagcctgccagccacatgggcagattctatatatttccaagtcccgcagccacaagactgaaagccatagagaattgacagctcaagcctcacctgaacaatgtgttgaaaggggatctctcaggacagacactttgatttcataaagttggcccattttggcccaaatataccaaatagagatgtcatgtaatgtcactgcaaatccagtacaagatactaagagtacccgagaacctggggttctctttcggccatccagaaggtgaggtcagccaggagggtgcccattgctctctgaccaactgatctgccagaggaaaagctgttcagtatccaagatgcatcaggtccaatcccaggggttcctagttctccttctgtgcctgctgtaacctcttggccacagcagtgatcagtgctgccccttttccactgccatcttctgacagcatgaatgtcacatcacatcgaggggctagttccttcacagtttcctgcaatattctagaaaagctatgaaaangagaaagaaacatcatcagcccttccatgtag

SEQ ID NO: 1635 - DNA, 2552 bp, Homo sapiens
tgatgtgtctttcctgcagtcagaggatggcagcgggaagggggcggcgctcatcactgctgtggcctgccgcatccgtgaggctggacagcgatagaacccctgaaatcggaagggacttcctctttctctccttcttccctgttttaaatcaaaacatcccatccccttgtgtcagagacagaccccttggcttttgcttggcagagaggaccccactggactgggttttgtctctgcatctcattgtagagcttggtggctgagcttggccctattaagataaatagagttccaaataaggatttgttcacatgcatcataaccattcccattggttctcccgcgtcccgaaaatgatctcccttagtaatcccccttgccaaattccatgtccctgtataattctacaggatggggacactaatgaagatacggttgcttcaccttggagcctgaacatgacatttctaagtggggtgcatcccccagcactgatgttgttactgattctcctgtcagagatctgggaggtctccactgaggatgtgagcctgattatcctataggcagacgtggggagggtggaggggtgacagtggaggaaaatccatggatatccacgcagcagcccctctttaacctcatatacaagcatttgccctgtggattccagcatttgccattcctggaatcaaggaatcctgagtctgggcaatgaaaccaaagccaggagttgacgcatcctgcagttgggccagctgttgcatctcagcggggcgcacatgttatccacaagcaatggacctttggggaagggggagtttttagtttgttttacaaatttttcctgcaaaagtggaatcactgtattttcattttaacttatatttgaaattttatttagttcttgaagtagatctgcttcttcatcttgacatgtaatggtcagttgtaccgtaatgtatttatatgttaatttgttatgtatatagatgtgcaagtcttgtcagaattggcctcagtgtagttaaagggcagaaggggaagatactgactagtcatagaaatacctcattcgcctgtgggaagagaagggaagcctcttcagggtgagtgaatggcaaagcggttgcttctggctcctccttcccctgtggtcttggaagtgtgtggaaggcagggacagagatggaggccgagccaatagactgaagagaccacagcaattggctcctccatctagagattttcttggcagtattccatgggatgttaagcaaaggaaaccaaaggaatcgtttcaaatggactcatggcttagaaatctttattcttagggcagtcagtagtattctaaagctttctgacaagataaaggaagtcaccaaaatttctttttttaaattgtatctaatcctcaacaacaaaccaaaacagaacaattaaacagccaaataaaacctcagggacaacatttttggtgtatttgagccctcccagcaagtttcaccttgggtttgtattttaaatgttttacaagaattgtccatgtgcttccctaggctgagctggcattggtctgctgacctgtttttgtgtttttcttttttttatacacaacatttatttcaaactattgggagggatgagagtggcttaaaaacttccatccctacttttcaagagtgcagttgattctgaatctgaaagcccgcctctgtcctaaaatacaaacaagcacagacattaaacctggatactatatgataaagagggatgtaactattgaattggatacaaggatcagaatggaaagaaactcacgatgaaattgaacctggtttttgtatatttatcaaacttgtgctgagaatagtgtctgattatacgacttttaagcaaagttgggtgtaattaggtgaaaacagcccaggtcctcccgggagcacagaggggctaggggctggtccttctcgtttgctctagtcttgctttgctgtctggtgtagctcctctgctgctcccatctgcactaattgacccaaaacgtgggtatttcctgctacacaaaagccaaaaggtttcatgtagattttagttcactaaagggtgcccacaaaatagagattaattttaacttaaattttaagcttgaagattaggtactatctgtgaagttacactttttttttttttttttaaaggtagagatgtgtgtgtgtgtaggtattaaagatgtgttgttggtttccaaaaaggaacactggaaaataaattttgaatgtttatgttctcagaatcaggttgacagtcccttgctgacatggctttgctttgtgtaaatacagtggatctcaatcttcggggtgtgatgaatagcgaatcatctcaaatccttgagcactcagtctagtgaagatgttgtcattatgtacaatacataactagtttaattaactatgtgatgttaactattattaataaattttaacattttccaaaataaaaaaaaaaaaaaaaaaaaaaaaaaaatctacctacccgacgcg

SEQ ID NO: 1636 - DNA, 478 bp, Homo sapiens
  misc_feature (1)...(478): n = A,T,C or G
gtcgaccccgcgtccgcggacgcgtgggcccagctactcgggaggctaaggtgggaggatcacctgaacctgggaggttgaggcagcagtgagctgtgattgtgccattgcactccagcctgggtgacagagcaagaccctgtctcaaaaaaaaggaaaagaaaaaagagttaaagagtggagaaagaaagggtggccggaggtccccaataaatgctcagtccagctgttgtggaatgtcccccctgcccccataaggtattcccggcgtttccacaagactctaaggcgcttggtgccagactccgatgtgcgcttcctcctctcggagagtggcagcggcaagggggctgccatggtgacggcggtggcctaccgcttggccgagcaagcaccggcagatagaggagacccctggcttcatttccacctcaccaaagacatnctgctgggaggtgaagaagangatgcaggccca

SEQ ID NO: 1637 - DNA, 592 bp, Homo sapiens
  misc_feature (1)...(592): n = A,T,C or G
acacccagtgtactttcttccccaggaagtgttttaacttcaatccagtgaaagctaaaatgtactttaggtagacacagtattactaaactcttaggatccttcagttatagtgtcagtagactcttctgtacagctggttatgccantggcagcaccaggcttggaatcgggtgatctgggctcttgtccagtattgagtgccgtctttgccgtctgctgagtgaacttagacattgctatttacctaatgtgcctcatttgctccatctgtgaagtgggattatttcagacccctatgaggatggtgaggagggtctattcatattttattggtttgtcctcagatgtttgaactccgtctccgatgttgtaagccctcagcagttgttgactcangagggagggttggaattttgtgttctccccttccaggttaattacacaggactctcctggtgctttttatgttgtagggaatcttgatcacgtggacaaagggttttaaggcaacagactgcgtggccnacgatgtagtcaccttactaaagggatgcgataaaaanggagaganggaactattaaaagaatg

SEQ ID NO: 1638 - DNA, 168 bp, Homo sapiens
  misc_feature (1)...(168): n = A,T,C or G
cgcgtccggctgnacnaagaccggggccgcgtntgcgncagcgtccngtggggctccttcagcgatgatggggcgctgggaccagagctgaccaccttngaccataccctgnaccatgagtccctgaatcctggtgctcagaggtttgagaagatgatcggaggcctg

SEQ ID NO: 1639 - DNA, 176 bp, Homo sapiens
  misc_feature (1)...(176): n = A,T,C or G
tggataaagggttttaaggcaacatactgcntgggccaccatgtantcnccttactnagggatgcnataaanaggaganangaatttgacctgnacgtggtggctgtngtcancgacacnttgggcaccatnatnacctgtgcttntgaggancccacctgtgaggttggactcnt

SEQ ID NO: 1640 - DNA, 511 bp, Homo sapiens
  misc_feature (1)...(511): n = A,T,C or G
gcaagatcgaaacacggcacntggctgccatggacaagtataaagaaggccttgctaatacaagagagatcctggtggacctgggtctggaaccgtctgaggctgactgcattgccgtccagcatgtctgtaccatcgtctccttccgctcggccaatctctgtgcagcagctctggcggccatcctgacacgcctccgggagaacaagaaggtggaacggctccggaccacagtgggcatggacggcaccctctacaagatacaccctcaagantggcagcaccaagggggccgccatggtgaccgcggtggcctccccccttcaagcccancggaaacaaattcnacagggttctggctttgttccaactgancccaanaacactccgtggaccttcaagccaagatgcnggcttgaactggaatntgggctgaanaanaaaaacacgggctggccacngtcangatgctgcccactactctgcgggctgccggacgcacanaaaaaag

SEQ ID NO: 1641 - DNA, 203 bp, Homo sapiens
  misc_feature (1)...(203): n = A,T,C or G
atcgtctccttccgcnttgncaatttctgngcagcanctctggcggncatcctgacacgcctccgggagaacaaganggtggaacggctccggaccacagtgggcatggacngtaccctctacaagatacaccctcagtncccaaaacgcctgcacaaggtggtgaggaaactggtcccaagctgngatgttcgcttgcttct

SEQ ID NO: 1642 - DNA, 384 bp, Homo sapiens
  misc_feature (1)...(384): n = A,T,C or G
tagggagtcgacccacgcgttcggtcaagtgtgtggaatttgttatgagcttcatcttgctgatgctgatgctaggaggaggtgttacatcattcgcaatgtcacctgctgctggacataggaaacagctgtggccctggacacagagatccataatgagctcccatataatgactacttcaaatactttggaccagattttcaagcttcatatnagtctttgcaatataactaaccagatcacttaatgatgcctgggaaaagatcaaacagcaaactgtctgggaacctgagaaatgctgccccacacacctagggcccaaatgtgggctcttgcttgaggatgtaacctangagggagagtggacaccaanggaccgaaga

SEQ ID NO: 1643 - DNA, 457 bp, Homo sapiens
  misc_feature (1)...(457): n = A,T,C or G
ccacgcgtccgaacaacgccatctggagggcctggtatatncagtatgtgaacgcggaggaagagccccgtgtgtggcttcgtgacccccctgcaggggcctgaggctgatgcgcaccggaagccggaggccgtggtcctggaggggaactactggaagcggtgcatcgaggtggtgatgccgggaataccacaagtggcgcatctactacaagaagcgggtcagtgggggagggccagggaggcccccagagctttcctcctgcggctgccggctaccgcccgcctcggaagatccctggaaaggggatcctgacccccgagcttgcgcccctcgggccctccattcagtcccgggccgacagcgccaccgtgtggccacagcgtntcctagcggcctccttacctagggntcggctccgtaagcccagcagggaagatgacctcctggcccctaa

SEQ ID NO: 1644 - DNA, 465 bp, Homo sapiens
  misc_feature (1)...(465): n = A,T,C or G
ggtgcacaccatcagcgcagccttcgaggcgctcaggaagcaggtgccgtgctactcatatgggcagaagctgtccaaactggccatcctgaggatcgccctgtgaacctancattccctgggcccctggncgccgggcctgggcctggaccctntgaacttaaccaggtgncccgnacncaaccaggcganacncttccaaggccttttcttccccgnaggttgttngtngnccaantnggncttgttttacccccggcatccccccttggcanttngccccgtagggggnanccggttgcccnnatgnaaagncngccaaaggggaaggttggaccttnggnctgcaggcaaagacccaaagggccacccacctggtgggnccccttccctttcccaagtacaagggcccctgnagngtaccaaagggggtggnaggccttccgnctttgganggttccccag

SEQ ID NO: 1645 - DNA, 448 bp, Homo sapiens
  misc_feature (1)...(448): n = A,T,C or G
gcacgagatggttctggtntggctgccactctntantctcttanattcacacnnaatgctncaccggggtctgctcttgatacaatnntatcaanttnatgtgatcttaaatcaangcttgattcgataactggtgtggcaacatatgtcttcncnganaanntgaanctcatatangacacccatcatttggtcnactntattccccatggttcaatacattcactctttgaaagaacntggtncttacttntggttggatgataagcntanaagaaattncgctcggagtccccactcccnaatnatgacactttggatcaaaggantctgactnnttgcntaccaaccatntcaccctgancntatcccangcccctgcccaatatattcccataatccccctgccacatccagtaaaancttgaatcgctgtccnttaatttaa

SEQ ID NO: 1646 - DNA, 385 bp, Homo sapiens
  misc_feature (1)...(385): n = A,T,C or G
gggaatttggccctngnggncaagaattcggccgaggtagcgcactgaacaccatnattgacaagtccaaagctgtcaaaacagggctnatggaacttttccaggattcaggcantactgatattgagggcttaaatcccaccaatgcctgntacgggggnctgcctccntcttnaangctgccaactggatggagtccagttcctgggatggncgtaatgccatgggggnctgtgganacattgccgttatatcccaggggtaatgctcgtccaacaggtggggccgaanctgtggntatgctgattgggcccaaggcccttntggccctgnaccgagggctgaggggaacccatatggaaaatgtgtatgacttttacaaacc

SEQ ID NO: 1647 - DNA, 421 bp, Homo sapiens
  misc_feature (1)...(421): n = A,T,C or G
caatcgacccttcaccctttgacgatttaccagtacatgatctttcatacacccctttttgccaagatggtccagaagtctctggctcgcctgatgttcaatgacttcctgtcagccagcagtgacacacaaaccagcttatataaggggctggaggctttcgggtgagttctcttcttggggagcctagaggctggtgaggtgtgagcaagaaggaggcttcttcatgccttaagtctagaccaccagcaccnctgtgggggacaaatggcaatcctccagcagaacaggaacaatcccaggtccttccacggggtagtgggttattgtctgggtagggccctccatgagttattgcagggaaacatgggggatttggcagcactgcaggatcaaggggcagtaagaaactacagaagat

SEQ ID NO: 1648 - DNA, 472 bp, Homo sapiens
  misc_feature (1)...(472): n = A,T,C or G
gcgtccggtggcaccggatgtctttgctgaaaacatgaatgctcagagaggacacacatcacttagccaactatattccccatgttcaatanactcactctttgaaggaacgtggtatctggtcagagtggatgaaaaacacagaaggacttacgcccggcgccccttcacaaatgaccacagtttggatgaaggaatggnnctcgtgcatagtaacacagcaacagagcatattccaagccctgctaagaaagtgccaagactccctgcaacctcggccgaatctgaatcacnctgtcatcacataacggggagcactgagagtctgtggcctttacagaggctcggngccggnatggggtatggaaaccggttggaggaatggatgtcttgggacaattnttgcagattatgngtttgcttaaaaatgnnatggaactgacacagancccagaaagctnttgngtttttg

SEQ ID NO: 1649 - DNA, 889 bp, Homo sapiens
  misc_feature (1)...(889): n = A,T,C or G
cggatgaagcctgctctgttcagcgtgctctgtgagatcaaggaaaagacagtggtaagcatccgtggcattcaagacgaagatccccctgncgcccagctcctgaggctggataacatgctgctggctgagggcgtgtgcaggccccgagaagagaggaagaggaggagcggtggccagggccggcacagcaacaccaggcctgtcgtgagttcaccacgcacgtcaccaacctcctccaggagcagagcaggatgaggcctgtctcccctaaggagattgagcgcatggtcggcgccattcacggcaagttcaccgccatccagatgcagttgaagcagagcacctgtgaggcagtgatgaccctgcgttcgcggctgctcgatgccaggcgcaagcggcggaatttcagcaagcaggcgacggaagtgctgaaatgagtatttttactcccatctgaacaacccttaccccagcgaagaagccaaagaaagagctggccaggaagggcggcctcaccatctcccaggtctctaactggtttggcaacaaaagaatccggtataaaaagaacatggggaagtttcaagaagaggctaccatttacacgggtaaaacggctgtggataccacggaagttggggtcccagggaaccacgccagctgcctgtcaacacctagctccggctcctctggacccttcccgctgcccagcgctggggacgccttcctcaccctgcggactctggcctctctccagcctcctctgggggaggctgctgcagtcccaggccagggtagctggcagggggccaccccccaacctgcaactgcttacctgctggagaccctggcagcatcaacttcagtacatctaattaagtttggg

SEQ ID NO: 1650 - DNA, 763 bp, Homo sapiens
  misc_feature (1)...(763): n = A,T,C or G
tttgtgtcataaaatattttattggaaaaaaagtcaccgtcttcgcaagagggggtaggggccccagcgacatcggggacccggcctccaggccgagccgacgggttgccccggggcaatctcaggccgttgtggcctgagcccaaccgctgggtccccgacgtccagaagcgggtgtgtgcctggaggctccccggccgggagggcaggccccagacggggtgggggtgcaggcgaggagcggggcgtgaatgcgcgtggagcgctctgcgccacggagctcagggtagagactgtagcttccgccgggctggatgcgagtctcccaggttagagcccagaagcgcgctgggacctgggtctggcttttgggtctgtgtccttcctcgtttggccccaattgtccgcattcaagatcataataaaaaggcttaggaagtaaacttcttggacacggaagggccggctcgcgggtttccgccgagtgagagggctgcgggtggcacgggcatcccaggccccgcaccgtataccgccctcagtcctcgcggctcctgtcgctgggctcgcccggcacctccncgggtttctctgcatccttggcgcgctcctgctcagtaagctgctcgctcgttggaattgagttcttcttgggccgccccntgggcttggtgggagactccaggccgccgccctgcagcactattttcttccacttcatcctccgattctggtaccacgtcttcacctgcaactggctccg

SEQ ID NO: 1651 - DNA, 349 bp, Homo sapiens
cagagtcaacagcgagcgagcagccggagcggggaagcagaagccagagaggggaagaatacggcgccccctctctccctcccctcccccttctactttagcctttctgcgcacttcgcttccaagtctccgcgcagccaggagccgctgttgcctcccagccccagcccaccgtgccctctgtgcctgccatgccgggcgtcaacaacctcactggcctcaccttcccctggatggagagtaaccgcagatacacaaaggacaggttcacagtggccctctcacccttcactgtaacacgccgtataggttacccctatcagaaccggacgccccccaagaagaagaa

SEQ ID NO: 1652 - DNA, 309 bp, Homo sapiens
  misc_feature (1)...(309): n = A,T,C or G
attttnggcccctttcgaaagggcnagggnaaagaccagtcnnaggtggaanacgacccgaagggctngggaggagagcttctcgctggagagcgatgtggactacagctcggatgacaatctgactggccnggcagctcacnaggaggangacccgggccncgcgctggaggagaccccgccgagcntcngcgccgcgggcngcnccncgtctacnggcangaaccggcggcggcggactgccttcaccancgagcagctgctggagctngaganggagttccnctgcnanaagtncctctccttgac

SEQ ID NO: 1653 - DNA, 480 bp, Homo sapiens
  misc_feature (1)...(480): n = A,T,C or G
ccgcgtccgaaatgggaatgggatntgtgtggaaggtgccctnctgacagagcaagatgttaaccatccaaaaccagcaaaaagagctcggaccagctttacagcagatcagcttcaggtnatgcaagcacaatttgctcaggacaacancccagatgcacagacactccagaaattggcagaaaggacaggcttgagcagacgtgngatacaggtgtggtttcagaattgnagagcacgccacaagaaacatgtnagncctaatcactcatnctccaccccagtcacagcagtcccaccctncaggctgtcttcacccatgttagaagaaatggcttattctgcctacgtgccccaagatggaancgatgttaactgcgctgcatagttatatggatggctcattcaccaacaactcttgggactccagnccttgttaccccattcaatgacacaactggncaataagtcataccttaa

SEQ ID NO: 1654 - DNA, 419 bp, Homo sapiens
  misc_feature (1)...(419): n = A,T,C or G
ccacgcgtccggaagatctggttccaaaaccggcgggcaaaggagcgcaaagtgaacaagaagaaacagcagcagcaacagcccccacagccgccgatggcccacngacatcacggccaccccagccgggccatccctggggggcctgtgtcccagcaacaccagcctcctggccacctcctctccaatgcctgtgaaagaggagtttctgccatagccccatgcccagcctgtgcgccgggggacctggggactcgggtgctgggagtgtggctcctgtgggcccaggaggtctggtccgagtctcagccctgaccttctgggacatggtggacagtcacctatccaccctctgcatccccttggcccatctgtgcagtaagcctgttggataaagaccttccagctcctgtgttcta

SEQ ID NO: 1655 - DNA, 254 bp, Homo sapiens
  misc_feature (1)...(254): n = A,T,C or G
cgtccgctggagaagaaaatgctgacccaccaattattcattttggacctggagaaagttcttcagaagatgctgtcatgatgaatacacctgtggttaaatctgcctttgaactgtttgtttcaccaggtctctattaaagcccgactagttctagaacccgagagccggccgcntagactaggtcttagaagaaaaaaaacccttcccaacaccctnncccctggaacccntggaaacaataaaaaattgga

SEQ ID NO: 1656 - DNA, 445 bp, Homo sapiens
cggagatttctcaaggtcccaacttcaaccttggtgttctgtccgccttgatttacaaaatggtcttgatcttttccaattaaaattctatttagtagagatacacagaaagtttgcaattcttccacaagaaaactgctgtatggcatagaaaaatatctacataatattttttgtttcttcttcttaattagctttcctattttcccttaggaaaacaaaaagtcctttctcctgattcaccaaaaaataaaatactgactaccatcactgtgatgagattcctatagtctcaggaactgaagtctttaaacaaccagggaccctctgcccctagaataagaacatactagaagtcccttctgctaggacaacgaggatcatgggagaccacctggaccttctcctaggagtggtgctcatggccggcctgtgtttggaattc

SEQ ID NO: 1657 - DNA, 368 bp, Homo sapiens
ccacgcgtccgtagtaacaacaatcttgactcattttctttgttcttgcctcggctgcaagagctctatatttccagaaataagctgaaaacactcccagatgcttcgttgttccctgtgttgctggtcatgaaaatcagagagaatgcagtaagtactttctctaaagaccaacttggttcttttcccaaactggagactctggaagcaggcgacaaccactttgtttgctcctgcgaactcctatcctttactatggagacgccagctctggctcaaatcctggttgactggccagacagctacctgtgtgactctccgctcgcctgcacggccacaggcttcaggatgcccggccctccgtcttg

SEQ ID NO: 1658 - DNA, 285 bp, Homo sapiens
gagtcgccccgcgtccgattttctaactgatctccctggatgcagtcatttcagtagactttcagttctgaacattgaaatgaacttcattctcagcccatctctggattttgttcagagctgccaggaagttaaaactctaaatgcgggaagaaatccattccggtgtacctgtgaattaaaaaatttcattcagcttgaaacatattcagaggtcatgatggttggatggtcagattcatacacctgtgaataccctttaaacctaaggggaactaggttaaa

SEQ ID NO: 1659 - DNA, 482 bp, Homo sapiens
  misc_feature (1)...(482): n = A,T,C or G
cccacgcgtccgaaagagcttgttccagccctagaacaaggcagccagaccacctttaaactctgtcttcaccaacgggattttgaaccaggcattgatatcttcgagaacatccagaatgctattaacacangcaggaaaaccttgtgcgtagtcagtaaccactacctacacagtgaatggtgccgacttgaagtccagctggntagcatgaagatgttttatgagcacaaggatgtcattatcttgatcttncttgaagagattccgaactataagctgtncagctaccaccgactcaggaaactcataaacaaacagacgtttatcacttggccggacagtgttcaccagcagccacttttctgggctcgcatcataaatgcgttgngcaaggagactgtggagaaagaaaatacacatctaattgntgttgagtgactngagtcttaacaatcccaaacccggatgcatgaatgttg

SEQ ID NO: 1660 - DNA, 328 bp, Homo sapiens
  misc_feature (1)...(328): n = A,T,C or G
ccccccccccccccccccctacaattatcccagctggtggtgctggttataaagttttagcacttttggatgtgcctgataagagtcaagaaaaagctgatttatacatccatgtgacatacatcaaaaagtgggatatatgtgctggtaatgccatcttaaaagccctaggggggcatatgactaccctgagnggngaanaaatcagttacactggttcanacggcattgaagggggactccttgntagcatcagaatgaaccaccaggccctggtcagaaaactcccagatctagaaaagacaggacataaatgagcataactgag

SEQ ID NO: 1661 - DNA, 1064 bp, Homo sapiens
  misc_feature (1)...(1064): n = A,T,C or G
tccgccccgcgtccgtggtgatgcagctggtttcattactagccatggtggactatatcttgccctgtagtgagtgactgctaaaacaacaatctaattgggaaaattccagcttgggcaatggtagatggtggttcaaatgtgaaagcccgctcttcctacaatgagaagaccccaaggatcgttgtgtctcgttcccattcagggatggtcaaacaggtcgctcttcagacttttggaaaccagactacaattatcccagctggtggtgctggttataaagttttagcacttttggatgtgcctgataagagtcaagaaaaagctgatttatacatccatgtgacatacatcaaaaagtgggatatatgtgctggtaatgccatcttaaaagccctaggggggcatatgactaccctgagtggtgaagaaatcagttacactggttcagacggcattgaagggggactccttgctagcatcagaatgaaccaccaggccctggtcagaaaactcccagatctagaaaagacaggacataaatgagcataactgattacagggtacagttcttcacagctgaaatggttagcctgagatgctggaagcttcaaaggattggtggagactatgcatggttaaggccatcccgaactttttaaagtatttatgaagcatcagagacttattttccctgtaatagaatgcaaaatcagggaaaatgggttgctttgtgtctcaagtattgtctttatttttgagactattttcatacagttgtcatacacaaggcgcatatatatatttgtgaattaaaatctgtagctgagtctacattgttatgagtcaccattttcacacaacatcatgaatcttcactgttagtactttcatatagaattcggttgaaggaaagattgatttttgtgtagatgtttaatataactttacaactatatctcattgaaaataaagtcattggggatttttacctctaatttggatggaaaaaaaaaaaaaaaaaaaaaaaaaaacccacgcgtccgcggacgcgtgggtcgnct

SEQ ID NO: 1662 - DNA, 632 bp, Homo sapiens
gcggccgcggccgatgggggcaccgtggacttgcgcgagatgctggctgtgtcagtgctggccgcagtccgcggcggcgacgaggtgaggcgcgtccgcgagagcaacgtcctccacgagaagtccaaggggaagacgcgcgagggagccgaggacaagatgaccagcggcgacgtgctgtccaaccgcaagatgttctacctgctcaagaccgccttccccagcgtccagattaatactgaggaacacgtggatgcagctgatcaggaggttatcttgtgggatcataagattcctgaggatatcctaaaggaagtaactactcctaaagaggtaccagcagaaagtgttactgtctggattgacccacttgatgctacacaggaatatacagaggatcttcgaaagtacgtcactactatggtgtgtgtggctgtaaatggtaaacccatgctaggagttatacataagccattttccgaatatacagcttgggcaatggtagatggtggttcaaatgtgaaagcccgctcttcctacaatgagaagaccccaaggatcgttgtgtctcgttcccattcagggatggtcaaacaggtcgctcttcagacttttggaaaccagactacaat

SEQ ID NO: 1663 - DNA, 374 bp, Homo sapiens
  misc_feature (1)...(374): n = A,T,C or G
tagggagtcgacccacgcgtccgnggngctgccccagccanngctgtggctgaagaggctctgggtgctcttgnaggtggngngggcntgtggtcnnggntaaagtgcttctgatattgnttccagacagagncaagcggaacatcctggccatgggcgagaagacgggtatgaccaggaaccccnatttnagccacgacanctggataccaacctttttcagcacccagtatttntggttcggnttgaaggtccgctgncagcgactagaggacacgactganctagggggtctggccccaaactgcccggtggtccgcctctcacgacagaggtgcaacatttgggagtttatgcaanatggctgggctttt

SEQ ID NO: 1664 - DNA, 360 bp, Homo sapiens
  misc_feature (1)...(360): n = A,T,C or G
gtccgttgagaaggtgtgcacgcantgacaacaagggaccttcgactcttcctgccacttctttgccacaaagtgcaccctggagggcaccaanaagggccacaagctccacctggactacatngggccttgcaaatacatccccccttgcctggactctgagctgacccgaattccccctgcgcatgcggnactggntcaagaacgtcctgntnaccctgtatgagagggatgaggacaacaaccttctgactgagaagcanaagctgngggtgaagaagatccatgagaatgagaagcgcctggaggcaggagaccaccccgtggagctggctggcccgggacttcnagaagaactat

SEQ ID NO: 1665 - DNA, 614 bp, Homo sapiens
  misc_feature (1)...(614): n = A,T,C or G
cggcttccgcagaatgtactttattgacaagtgaatcaagagaaatagacatacattgaactcctcaagacccaggcagagtaggtatgtctttatgaattaaaggaatccaccagcaaaagtataagcagaagtgagaaaagaaggctgcaaaagctggcaagtcaccaagaaacattggctttaactcagcattttccaggatgctttaggctaatctttccaccacttttcactatggccttacagaaggcacatttattgccatatgtctggccatcagagccacagtgtgggttagattcccgagtgcagtagaccttggtgtcctggaactcaccacagtcaacctgtcctccctgactgaagacacctgttaaaaagcanaaaagagccagagagaggagcagaaacatgcctgacagtttcattgtgtcagttagctcacttaaatcaaggctgctttgtccagctgangttctttgtcaagacaattcccaaaaagccctaaaatcattcagaccacatgagntctatgcagtttatgcatttaaatgggggctggccaccattaaaaaaatgcttcatgctccccatcaattttaaaaattggg

SEQ ID NO: 1666 - DNA, 538 bp, Homo sapiens
  misc_feature (1)...(538): n = A,T,C or G
tccgggcgtggagtgcggcccgggcaaaggcgtgccgcatgctggggggccgcccgcgctgcgagtgcgcgcccgactgctcggggctcccggcgcggctgcaggtctgcggctcanacggcgccacctaccgcgacnagtgcnagctgcgcgccgcgcgctgccgcggccacccggacctgagcgtcatgtaccggggccgctgccgcaagtnctgtgagcacgtggtngtgccccgcggccacaatcgtgcctttttgaccaaaaancggcaacgcccanttngttnttntntttaaanggggggccttttgcntttntggcccttnaaaccccatgtcnaaaaaantttttttnggggtaaaaaaaaaaanngnnaaccctaaatttttttttttggcnaaaattnnccnaggnnnnaantttttttttttnggggggntttantttnttttnnncccccccncggtgtgttttttaaaaacnccccntttnnaaaanccccnnanngnggtttnnttannaaaaaaaaaaaaaa

SEQ ID NO: 1667 - DNA, 430 bp, Homo sapiens
  misc_feature (1)...(430): n = A,T,C or G
gtccgacnagagggttttcgatcttgggggttaangggtgggtcttggggccaagagccctgcggggttctcagcgagatgtcccctgaacttcccctggcacccggcctgcagagtcctgtgagcacgtggtgtgcccgcggccacagtcgtgcgtcgtggaccagacgggcagcgcccactgcgtggtgtgtcgagcggcgccctgccctgtgcccttcagccccggccaggagctttgcggcaacaacaacgtnacctacatctcctcgtgccacatgcgccaggccacctgcttcctgggccgctccatcggacgtgcgccacgcgggcagctgcgcaggtgcagacgcgnggctgggggcacaggcctgtcctgggggccggagaaccccctgccctgcgccctcaatgctcttatcgacccttt

SEQ ID NO: 1668 - DNA, 403 bp, Homo sapiens
  misc_feature (1)...(403): n = A,T,C or G
cgttcgtctggcttttgcacccagatcttcgacaatgaaggtggctgtcatctttcttctcagtgctttggccctgctgagtttagcaggtaacactttttcagctaaggtgactggaaaagaggctagttgccatgatgcagtggcgggatgtcccagaatttatgatcctgtgtgtgggactgacggaattacttatgccaatgaatgtgttctgtgctttgaaaacaggaaacgcatagagcctgtcctcattcgaaaaggtgggccttgctgaaagtcaagattttgaactctgttatggctaccgtaatgtttggcaagtgggttcgttgaataaatgcatctgaacatnnnnnnnnnnnnnnnnnnnnnnnnnnnnnnnnnnnnnnnnnnnnnnnnn

SEQ ID NO: 1669 - DNA, 161 bp, Homo sapiens
  misc_feature (1)...(161): n = A,T,C or G
cccttgagagagcnaagctgaacgtgaatgaaaactttctgctcgtggggattcttgaagagntggaagatgtgctgctgatactggaaagatttttacctcattacttcaagggcgtgctcantattctacaaagacccagagcncatgaagcttggaaa

SEQ ID NO: 1670 - DNA, 529 bp, Homo sapiens
  misc_feature (1)...(529): n = A,T,C or G
cgcgtccgaaccggacctacgcctgctnctgtcacctgtttgntaccaagtgcatgctggaatgggaccaaaaagggacaccagctgcagttggattactttggagcttgcaaatctattcctgcttgnacggacttcgaagtggntnagattcccgctgcgcatgagagactgnctcaaaaacatcctcatgcagctttacgaacnanaccccaaacatggnggctanctaaatgaaaagcaaagaagcaaagtnaagaaaattnacctggatgaaaagagactcttggntggagaccaccccattgaacttctcttgagggacttcaagaaaaactaccacatgtatgtgtatnctgtgcactggcagnntaacgaattggaccagcatcctgcggacaggancttgacacattctgnacttgcgcctctgcgagcttccctggtgcccatggagcactgcataacgcgcttctttgaggagngtgaccccaacanggacaagcatattaccttgaaggaatggggc

SEQ ID NO: 1671 - DNA, 349 bp, Homo sapiens
  misc_feature (1)...(349): n = A,T,C or G
ggngntaataaaacctgnggggaagatatgtggagacctcaaagatccctgcaaattggacatgaattttggaagctgctatgaagttcactttagatatttctacaacagaacctccanaagatgtgaaacttttgncttctccggctgtaatggcaaccttaacaacttcaagcttaaaatanaacgtgaagtagcctgtgttgcaaaatacaaaccaccgaggtgagaggatgtgaactcatgaagttgtctgctgcaccatccgaaataaagacacaagaaaattcagactgattttgaaatctttgtaatatttccataatgctttaagcttccatatgtttgc

SEQ ID NO: 1672 - DNA, 576 bp, Homo sapiens
  misc_feature (1)...(576): n = A,T,C or G
tgagtgnaaagtccttcctcgctgtgaataaacatggtccctcctaagactgtatcactttcgggacctgtctccggatttcttctgaagacggtataattttgggacctcatctccagatctcatttaaggactactgactcatcaagaaatgacttacaaaatgaagaaagaatatgccttttgggccactgtgtgtctgttgcttagccttgttcccgagtttcttaatgctctgtctgaggaagctgatgacacagaaaggccagatttctgcttcttggaagaggaccctggactctgccgaggttacatgaagaggtatctttataacaaccagacaaagcagtgtgaacgattcgtgtacggtggctgcctgggcaaccgcaacaactttgaaactttggatgagtgcaagaagatctgtgagaatccagtccactccccttccccagtgaatgaggtacagatgagtgactacgtaactgatggaaatactgtaactgatcgcagtactgtaaataantcnggggttcccagtcttcccaaagtgcccaaggcgtcgggttacaaaaa

SEQ ID NO: 1673 - DNA, 407 bp, Homo sapiens
  misc_feature (1)...(407): n = A,T,C or G
caggcgctttctcggacgccttgcccagcgggcctccctacccngggnacnanggaccccactcaccccctggggctttccattctgctgntttttctgacggaggttcaactgggcgattgcttcttaangaacccaacaggaaanaaacgcggaaaatcttgtcttcttgcccctagaattacngaaccctgccggggccttatttttccgtnngnacttacaanaggtacacccaaagttgncgnnagttcctgtacgggggctgcaagggcaacnccaacaatttttacacctgggaggcttgcaacaatncttgttggaggataaaaaaagttccnaaagtttgcccggttgnaagtnantgtggacaaccagtgtnagggggtccacaaaaaagtatttnt

SEQ ID NO: 1674 - DNA, 435 bp, Homo sapiens
tactatagggagtcgcccacggtcagagccatctaccaagggagtttcaatacgaagaaaactcagcctccagttcttcaggcagcgcaccgagcatctagttcaaccattaacctgatggtgaacacagagccactgtttctcactaaaacagatatctgtaagctgcccaaagatgctgggacttgtgaggacttcaaattactatggcactatgacttagagagcaaaagttgcaagagattctggtatggaggctgcgggggcaacgagaacagattccactcacaggaagaatgtgaaaagatgtgtagtcctgagttatcagtctgacgagatcctaagcaaggccttcgggcaacacgtacctctgggagaaggaggaggcagccatttctcactcggtttttatagaagctctgggtagatgcccca

SEQ ID NO: 1675 - DNA, 731 bp, Homo sapiens
  misc_feature (1)...(731): n = A,T,C or G
ttttaaaaagtaaaagtttttattgaattgccatttataaaacactgtgcatagcaatttcttttcatattcatgtgaaacatatctccaaataatcctagaacatatataggttctagaacctaaatctaatctcatcaaatttcaaagaataaaaagcttacagataattgtctgtctctactcctgaaagcacatagaaatgggtaagaaaataacaagaaatccgtaatttattaggaaagttaacaacacattttataaataatcccatggtctaaagaatccaataccaattagaattagccaatatattaattgaaagataatgaaaaaatgttatatcaatacctatacaatgctacaaatcaagtgtttagaggaaaatttacatccataaacaaatttgtgaaaatgaatggctgaaaactaatatattgaggagtgtattgatctcaaaaactaaaggtattagaaaatattaaataacaaagaaaatagcaaaacatactaaattgtactcatgtaaccaaataccacctgtttcccncaaaactatggaaataagtataaaaataacaataaactataatacaaatgtaaaataagtatcancaaagcccaaagttgttttttaaaaaaagaatgaaattaataaaccagtgncacngntgnnnnnanngngntgncacacacggccatncggnactnttctgtgtcaaagntgtncc

SEQ ID NO: 1676 - DNA, 287 bp, Homo sapiens
  misc_feature (1)...(287): n = A,T,C or G
nnctnngggcgnccgcgcnngnnctaaccacagctcacacgannaggntgnggtnnnnctagaagccctgctgcagcctggacagngnnntgctnggacncgntgaagactctaganctgnanntacttnnggattncccagagnnagantgcgctcttntttacgcnggcctntcnctnangagtcagngnnaccttcacancatncgagattncattttgncccangatacatgggacactgaggaagacatcctcattgattccatagagacccttaatcatgg

SEQ ID NO: 1677 - DNA, 294 bp, Homo sapiens
  misc_feature (1)...(294): n = A,T,C or G
cgtncgcattgccnngcgccctcgangaccgnccgacgtncatncccgattccttttggttccaagtccaatatggcaactctaaaggatcagctgatttataatcttntaaaggaagaacagaccccccanaatangantacagnngttggggtnaggtgctgttggcatgncctgngccatcantntcttantgaaggacttggcanatgaacttgctctngntgatgtnatctnagacanattgangggagagatgatggatntccancatggnagccttttccttanaac

SEQ ID NO: 1678 - DNA, 256 bp, Homo sapiens
  misc_feature (1)...(256): n = A,T,C or G
aactcagaaattaaaacccaccccaacctccaaaacatgaccanccctggcnnntgccttttangacaanttgaagggagagatgatggatctccangggggcanttcttttcttagaacaccaaagattgtctntggcaaagactatnatgtaactgcnaactccaagctggtcattatcacggntggggcacnncagnaatnaggggaagnaannctgtctaaatttcgtccagcttaacgtgaacatctttaa

SEQ ID NO: 1679 - DNA, 409 bp, Homo sapiens
  misc_feature (1)...(409): n = A,T,C or G
ccnncgacggatttattgccacgcgcccccgacgaccgcccgacgtgcattcccgattccttttggttccaagtccaatatggcaactctaaaggatcagntgantgataatcttctaaaggaagaacagaccccccagaataagattacagttgctggggttggtgctgtngncatggcctgtgccattagtatnttaatgaaggacttggcanatgaacttgctcttgttgatgttcatncgaangacaaattgaagggagagatgattggatctccaacaatngcagccttttccttanaacaccaaagattgtntctggcaaanactataatgtaactgcaaactccaagctggtcattattactgntggggcactgtnnntcaagagggagaaagccgtcttaa

SEQ ID NO: 1680 - DNA, 321 bp, Homo sapiens
  misc_feature (1)...(321): n = A,T,C or G
cacgccccgccggatcttattgcccgcgcccccgacgaccgcccgacgtgcattcccgattcctttnggttccangtccaatatggcaactctaaaggatcagctgatttataatcttctaaaggaagaacanacccnccagaataagantacagttgnnggggttggngctgttggcatggnctgtgccatcantntcttaatgaaggacttggcnnatgaacttgctnttgntgatgtcntcgnanacaaatngaagggagagatgatggatctccaacatggcngncttttncttanaacaccaaanattgtctttgg

SEQ ID NO: 1681 - DNA, 347 bp, Homo sapiens
  misc_feature (1)...(347): n = A,T,C or G
gttggagtactngtnttcttgtagctcctgccagnagctccgtgtcccgcccgccctagccatgctgtccgctctcgcccgtnctgccggngccgntctccgccgcagcttcagcacttcggcccagaacaatgctaaagtggctgtnctgggagctnaatgggggcattgggcaacccctttcactcctgctgaagaacagncccctagtgagccgcctgaccctctacgatatngntcacacacctggtgtggcagcagatctgagtcacattganaccagagcaaatgtgaaaggctaccttggaccggagcagttgccagattgcctcaaaggttgtgatgtg

SEQ ID NO: 1682 - DNA, 301 bp, Homo sapiens
  misc_feature (1)...(301): n = A,T,C or G
attccggatctnattgcccgcgcccccgacgaccgcccgacgtgcattcccgattccttttggnnccaagtncaatatggcagctctaaaggatcagctgatntataatcttctaaaggaagaacagaccccccagaataagattacanntgttggggttggtgctgttggcatggcctgtgccatcacnnatcttaatgaaggacttggcaggatgaacttgctcttgntgatgtcatcagagacanacatgaacggagagatgaggggatctccaacatggtttntcnntggcttagaa

SEQ ID NO: 1683 - DNA, 427 bp, Homo sapiens
  misc_feature (1)...(427): n = A,T,C or G
ncccataacttgctcttgttgntgtcatcgaagacaaatcgaagggagagatgatggatctccaacatggcagccttttgcttagaacaccaaagattgtntgtggcgaggactataatgnaactgcaaactccaagctggtcattatcacggctggggcacgncagcaagagggagaaagccnacttaatntggtccagcgtaacgtgaacatntttaaattcatcattcctaatgttgtaaaatacaagnccgaactgnaagntgcttantgttancanaancacagtgggatatcttggaccctacagtggnttgggaaagatagagtggnttttnccaaaaaacccgtgtntattggaagtgggntgnaaattcttgnattgaagccncngattccngtttaccctgaatggggggggaaaag

SEQ ID NO: 1684 - DNA, 292 bp, Homo sapiens
  misc_feature (1)...(292): n = A,T,C or G
gacgngcattcccgattccttttggttccaagntccaatatggcatctctnaaggatcanctgatttataatgntctaaagggngaacagaccccccagaataagattacagttgttggggttggtgctgttggcatggcctgtgccatcagtatctnaatgaangacttgncagntgaacttgctcttgttgatgncancgaagacaaattgaaggganagatgatggatctccaacatggcagncttttncttanaacaccaaanantgnctctggcaaagactataatg

SEQ ID NO: 1685 - DNA, 537 bp, Homo sapiens
  misc_feature (1)...(537): n = A,T,C or G
cccccgcgaccgcccgacgtgcattcccgattccttttggttncaantccaatatggcanctctaaagggncagctnatttataatcttctaaaggaagaacngaccccccanaataagattacagntgttggggntggtgctgttggcatggcctgtgccatcagtatcttaatgaaggacttggcagatgaacttgctcttgttgatgtcatcnaanacaaattgaagggagagatgatggatctccaacatggcagccttttccttagaacaccaaagattgtctctggcacagactataatgtaacttgcaaactccaagctgggcattatcaccngttggggcacgtcagcaagagggagaaagccgccttaatttggtccagccgttacntgaaacatatttaaaattcatcattcctaatgttgnaaaaataccancccngaactgcaagttgcntcattgtctcaaatnccagtnggattntnttnacctacntggccttggaagganaagtggtttttcccaaaaacc

SEQ ID NO: 1686 - DNA, 189 bp, Homo sapiens
  misc_feature (1)...(189): n = A,T,C or G
ggcccctaccggtccagccatgctctncggcctcncccgnnctgncagcgctgntctccgccgnagcttcagcacctngggccagaangntgctaaagtaactgtgctaggggcctntggaggcatagggcanncacttnnacttattctgaagaacagcccnttggtgagccgactgaccctctatga

SEQ ID NO: 1687 - DNA, 199 bp, Homo sapiens
  misc_feature (1)...(199): n = A,T,C or G
cacgcgtacggtaactgcaaactccaagctggtcattatcacggctgnggcacgtcagcaagaggngagaaagcccgcttantttgnnccancgtnncgtgaacatcttnaaattcatcattcctaatggtggnnaatacagcccgaactgcaagntgcttattgtttcaaaatccatcngatatcttgacctaccgtg

SEQ ID NO: 1688 - DNA, 306 bp, Homo sapiens
  misc_feature (1)...(306): n = A,T,C or G
agtcaccncgcgtccgagncngtgcccctnccgctccagccatgctctccgccctngcccggcctgtcagcgctgctctccgccgcagctnnagnacctcngnccanaacaatgctaaagtanctgtgctaggggcctntggaggcatngggcanncactttnactnctcctgangaacanncnctnggtgagccncctgaccctntatgatatcgnncacacacccggagnggncgnagatctganccacatcnagaccaaagccnctgngaaaggctacctnggacctgaacagntgcctgact

SEQ ID NO: 1689 - DNA, 337 bp, Homo sapiens
  misc_feature (1)...(337): n = A,T,C or G
gcgtccgnnnnnnnnnnnnnnnnnnnnnnnnnnnnnnnnngggtncngatnttattgtcncgccncccncnacnaccgcccgacgtgcattcccgattccttttggttccaagnccaatntggcaacttctaanngatcnncctgntttataatncttctaanggaagaacagaccccccntnntgagattncntntgntngggtnnnngcctgttggcatggcctgngccatcagtaatctttaatgaaggacttggcngatgaacttgctcttgttgatgtcatcnaagacaaattgaagggagaagatgatggatctccaacatggcagccttt

SEQ ID NO: 1690 - DNA, 587 bp, Homo sapiens
  misc_feature (1)...(587): n = A,T,C or G
ganccacgcgtccgcgctgccgccgattccggatctcattgccacgcgcccccgacgaccgcccgacgtgcattcccgattccttttggntncaagnccaatatggngnactctaaaggatcagctgatttataatcttctaaaggaagaacagaccccccagaataagattacagttgttggggttggtgctgttggnatggcctgngccatcagtatcttaatgaaggactttggcagatgaaacttgcttcttgttgattgtcatccgaaagacaaattggaaggggagaagatnatggnattntnccaaacatgggnnanccntttttttcntttagnanacaccaaaaagaattggnttttttnggaaaaaaaaccntttnntaangnggaaantnntggaaaaaacntnccaagggngggggggtantttnaaaaaggggggnggggncctttttttttaanaaaaanggnanaaaaaaaannccccttnnntanattttttnccccccccctttttcgcgncnncnntnttttnananaaaaacctcccntnctctngngggggggggnnaaaaaaaaan

SEQ ID NO: 1691 - DNA, 441 bp, Homo sapiens
  misc_feature (1)...(441): n = A,T,C or G
ccccgcgtccgccggatctnttgcccgcgcccccgncgacngcccgacgngcnttgccgattccttntggntccaagtccaatatggcancatctaaaggatcagctgattnataatnnnctaaaggaagaacagaccccccanaatnngatnncagnngttggggttggngctgntggcatggcctgtgccatcacatatcttaatganggncttggcnnnngancttgctcttgntgatgtgntngaagncaaattgnagggagngatgatggatctccaacanggnagccttttccttagaacaccnaagattgcntctggcaaagactataatgtaactgcaaactccaagctggncattatcacngntggggcacgtcagcnagagggagaaagccgtctaatttggtccagcgtaacctgaacatctttaaattc

SEQ ID NO: 1692 - DNA, 272 bp, Homo sapiens
  misc_feature (1)...(272): n = A,T,C or G
cacgcgtccccaaatctcttaaccnagaactgggcactgacgcagacaaggagcagtggaaggaggttcacaagcagntggtggacagtgcctacnaggtgatcaagctgaaaggttacacatcctgggccattggcctctctgtggcagacttggcttgagagcataatgaaagaaccttaggcgggtgcatcccatttccaccatgattaagggtctctatggaatcaatgaggatgtcttcctcagtgtcccatgtatcctgggacaaa

SEQ ID NO: 1693 - DNA, 466 bp, Homo sapiens
  misc_feature (1)...(466): n = A,T,C or G
ccccccgtcctgcgggccagccagagaatgacgctcggtgggacgcgaatttcctatgcctggggatggccctgtgtctgcgtcaagcaaccgcgcatcccgctcaacggcacctggctcttcacacccgtgagcaagatggcgactgtgaagagtgagcttattgagcgtttcacttccgagaagcccgttcatcacagtaaggtctccatcataggaactggatcggtgggcatggcctgcgctatcagcatcttattaaaaggcttgagtgatgaacttgcccttgtggatcttgatgaagacaaactgaagggtgagacgatggatcttcaacatggcagccctttcacgaaaatgccaaatattgtttgtagcaaagattactttntcacagcaaactccaacctagtgattatcacagcaggtgcacgccaagaaaagggagaaacccgccttaatttaa

SEQ ID NO: 1694 - DNA, 628 bp, Homo sapiens
  misc_feature (1)...(628): n = A,T,C or G
caggttcttctccaggccctttttccccaagagcaagggcgtagagaagtaagtgcattccgtctctttggactgaacaaaagaacactcaacgactccttccttcccgttcatggcgtccacgaggcagaagacaaagcgggctccagcataagccatggacagagtggcagaacctgctcaagccttggccttcacgacttctgtgccagcctcctggatcctcccggtgagtgtggccagctggtcttggggaaagtcaaccttcggggtacactgagagatcagggggatgatcgtcttcccggcgtggccgccaatgacaggcacgttgactcgaagctggatccaaaccctttagctctgccacaaacgtgttcgctctgacgatgtcaagggttgtcacaccgaagatcttgttagggttgtacacaccgtgcttcttgaaaacttctgctgtgatggggatggtggagttcactgggttggcaatgatgcaaaccatggcttcaggacagtgctgggcacaggcagccgtcagggtggccacaatggtagcgttggtgttgaacaggtcatcccgtgtcattcctggtttcctgggcactccggctgggcggacgcgngg

SEQ ID NO: 1695 - DNA, 969 bp, Homo sapiens
  misc_feature (1)...(969): n = A,T,C or G
ctcttagacctctcagaagggactaaaggagccacgatggaccttgaaatcttcaaccttcctaatgtggagatcagcaaagatttgtctgcctctgctcattccaaggtggtgatcttcacagtcaactctttgggtagttctcagtcgtaccttgatgtggtacagagcaatgtggatatgttcagagcccttgtcccagctctgggacattatagtcaacacagtgtcctgctcgttgcatctcaaccagtggaaatcatgacctatgtaacatggaaactgagtacatttcctgcaaatcgagtgatcggaattggatgtaatctggattcacagagattacagtatattattacaaatgttttgaaggcacagacttcaggcaaagaagtatgggttattggcgagcaaggagaagacaaagtgctcacatggagtggccaagaagaagtagtgagtcatacctctcaagtgcagctgtccaacagagccatggaactgctaagagtaaaaggtcaaagatcctggtctgttggactatcagtagctgacatggttgacagtattgtaaacaataagaagaaagtgcattctgtatcagctttagcaaagggatattatgatataaatagtgaagtgtttttaagtttgccttgcatccttgtaaccaatgcantaccttaagttaccaaaaccacacttaaagaagatacagttactgagaaactccaaagcagtgcatcctcaatccacagtctccaacaacagttaaaactttgattctcaaatgcaatttgagaggctggacttctacctaaagggaaaagtctttaattttacctatatatggnttgaggatttctgtatcctgctacttacntttacaaactgcctggttaagtanaggggttcctgattagctttgngaggtaaanccctaggggttttccaggggggggaaattaa

SEQ ID NO: 1696 - DNA, 402 bp, Homo sapiens
  misc_feature (1)...(402): n = A,T,C or G
ccgcccacgcgtccggtggaaatcatgacctatgtaacatggaaactgagtacatttcctgcaaatcgagtgatcggaattggatgtaatctntattcacanagattacagtatattattacaaatgttttgaaggcacagacttcaggcaaagaantattgggttattgncgagcaaggagaanacaaagggatattatgatataaatagtgaagtgtttttaagtttgccttgcatccttggaaccaatggantatctgaagttatcaaaaccacactgaaagaagatacagttactgagaaactccaaagcattgcatcctcaatccacagtctacaacaacagttaaaactttgattctcaaatgcaatttgagaggctggacttctacctaaaggga

SEQ ID NO: 1697 - DNA, 532 bp, Homo sapiens
  misc_feature (1)...(532): n = A,T,C or G
gcacgagccncacgactgttncagaggtctccagagccttctctctcctgtgcanaatggcaacncttaaggaaaaactcattgcaccacttgcggaagaaaagcaacagttcccgtcaatacgatcactgtantgggtgttggaccagtnggnatggcgtgtgntatcaacatcctgggaaantctctggctgatgaacttgctctngtggatgttttggaagataancttaccngagaaatgatggatctgcnccatgggagcttatttcttcngngnaccngtgattgtggcccataaacattattctgtnaccgccggttctatanattgtagtggtgactgcaagantccgncngccanaatgggaaantccgctcactctggtgcanacaaattgttaatgtctnccgatncnttattcctcacatcgtccanttcagtccngatnggntcnaaaatgtggttnccccccagtgganantcctcacctatgttncctggaaactnagtggattacccnaccccccc

SEQ ID NO: 1698 - DNA, 270 bp, Homo sapiens
  misc_feature (1)...(270): n = A,T,C or G
tcntgccgcgactgttacagaggtctccagatccttctctctcctgtncnaaatggcaactctnngggaaaaactcaatgaaccagttgcgnaagangaagcaacagttccaaaccntaatatcactgtactgggtgttggacaaattggtatggcgtgtgctatcaccattctgggaaagtctctggctgatgaacttnctcttgtggatgttttggaanataancntaaagganaaatgatggatctgcagcatnggaacttatttct

SEQ ID NO: 1699 - DNA, 259 bp, Homo sapiens
  misc_feature (1)...(259): n = A,T,C or G
tccgcacgactgntacanaggtcttctgagccttctctctcctgtgcaaaatggcaactcttaaggaaaaactnattgcaccaagttgcngaagaagaggcaacagttcccaacaataatatcactgtagatgggtgtcggacaagttggtgtggcngtgngctatcangcattctgggaaagtctctggctgatgaactngctcttgtggatgttttggaagataancttaaaggagaaatgatggatctgcagcatg

SEQ ID NO: 1700 - DNA, 403 bp, Homo sapiens
  misc_feature (1)...(403): n = A,T,C or G
nagacacctaaaattgtggcangataaatttcattctgtngcccgcnaatnnnaaagattggnnggtgggtaacctgcangnancccgtcaanaaagaanggncanaantnnggntcaatntgggtgcnanngaaaatggccatggtnttnnaaatttcaattatttcctcaatatcgntcagagtgccagtncctggattgtatcatannttggtgngctttgcanncnccanncggnaccattctttaccntatgttacnctgnaaacctaagtgggattaccccanacacccgngtgatnggaaagtggatgtaanctggattctgctaganttngctaccttatggctnnaaaacttggcattcattccancagctgccatggatggattttgggggaa

SEQ ID NO: 1701 - DNA, 1314 bp, Homo sapiens
ccacgcgtccgctgtcccattgagtgtggcccactgaggtgccatcctggacccacaggggaacttccggcatacggagactcgcaacactgtgtcccgcgaggagctcatgatggtgctggccagcctggagcagctgcagatccgtgccctcttctcacagatctcctcggctgtctccctggcagggtggcactggaggtggccagcccagcaggccagggggccctggccagcaatgtggagctgtgcctgtgccccgccagctaccggggggactcatgccaggtgaggttaggacagcaccagactgcgaggcggctcacctgtgcacacccttccctccagcatcctccctgtgttcccttcttgctgcctccaacccctctcaccctactcacctctcttcctgcccctgcttttcgcaggctgctggccaactcatgggcctgcctgtcccctgctgcctgtctgcctgcccctcgtctgcctgcccctcatctcctcccctcatccgcctgcctgcccctcatccgcctgccccttccatgcacaacaccctccataccccttttccaacctaccccagcccccaccaattgggtcaacctggacatcccccaccgaccatcctggcgtctgcctgtcattctgcccatccctcgcccactgtgtgtctgtccagctgctaatctgccctgctaatctgtctgtctgctgtaactttgctccttctgtatgaggaggtttgtggttgaatacctcctagaaggagtggaaagagcaggccctggtccacatggagtgggtggtcaccagccccaaggcctggtcattcccgagacaggacatccgtgtggctttgagagctatgtcctcaaacagcagccaggtgctggcccacctccagccggccgaggccaggagttcctgaccagcctctgacccagcggtgaccatgctccacgggttcccagtgcctcgtgcctgcaggatccctgagggtctgacttgtgagcttgcagggtggggcccctcgtcctctcaatcgctgatgccacctgcccccgtacaccctcaggaatgtgcccccggcttctatcgggacgtcaaaggtctcttcctgggccgatgtgtcccttgtcagtgccatggacactcagaccgctgcctccctggctctggcgtctgtgtggactgccagcacaacaccgaaggggcccactgtgagcgctgccaggctggcttcatgagcagcagggacgaccccagcgccccctgtgtcagctgcccctgccccctctcagtgccttc

SEQ ID NO: 1702 - DNA, 1314 bp, Homo sapiens; identical to SEQ ID NO: 1701

SEQ ID NO: 1703 - DNA, 401 bp, Homo sapiens
  misc_feature (1)...(401): n = A,T,C or G
tagggagtcgncccacgcgtccttgagcactccncacaatggagcccaaatggggtcctcctgagcccanntnacgaggaggagctcacagcaccagggaagttcctgggagaccagcggttcagctatgggcagcccctcatactgaccttccggntgccccccggggactccccactccctgtacagctgaggctggaagggacaggcttggccctgtccctgaggcactctagcctgtctggcccccaggatgcngggcatccnagggaggtagagctcaggttccacctgcaggagacctccnaggacgtggccccttcactgnccccctttcacttncagcggnttcttngccaacctgaccagcctccgcctccgngtnagtcccgggcccagtc

SEQ ID NO: 1704 - DNA, 527 bp, Homo sapiens
  misc_feature (1)...(527): n = A,T,C or G
gggagtcgacccacgcgtccggaacgtgcagggccccaaatgtgaccagtgcagccttgggaccttctcactggatgctgccaaccccaaaggttgcacccgctgcttctgctttggggccacggagcgctgccggagctcgtcctacacccgccaggagttcgtggatatggagggatggntgctgctgagcactgaccggcaggtggtgccccacgagcggcagccagggacggagatgctccgtgcagacctgcggcacgtgcctgaggctgtgcccgaggctttccccgagctgtactggcaggccccaccctcctacctggagggaccgggtgtcatcctacggtgggaccctccgttatgaactgcactcagagacccagcggggagatgtctttgtccccatggagagcaggccggatgtggtgctgcagggcaaccagatgagcatcacattcctggagccggcataccccacgcctggccacgttcaccgtgggcagntgcagctggtggaggggaac

SEQ ID NO: 1705 - DNA, 822 bp, Homo sapiens
  misc_feature (1)...(822): n = A,T,C or G
cgaggganaatacgtanttttctgttttagaatancctgtcttcttggtttgatgtgtacaangagattnatatcctntgtnaacttccannctannctgggaataaagggcatttgtttgcttcatacgtatgatttatgacctttgatgtgtttgtcccncaggaaaaccttttgacatcanctatgtgcntctcaagttcnacaccaaccgcccggaaagctttgccatttacaatncgctcacgggaanaccggccctggattccttaccagtactacactggtncctgtgagaatcctactccnangcaaaccgcggcttcatcaggacangaggggacnancatcaggccttgtgtactgatgaatncagtgacntttctcccctcactgggggcaacgtggccttttctaccctgtaagganggccaccgcctataactttgacaataaccctgtgctgcangtnnattctcacacgttggcctgaaaccaagctagttctncaacattcgaagtgtaggaagattattgtaatgnggcttgttgttccccttcttangtacggggtcagagtntaatacttgaaanaccccnacagaaancttgatgctgctctctgtnttacnattaatnantgaangaaattntttngtncccgctgcctggttgaatntttgttccttatncccttgngtatntattctngggaaattaaacttcacacattttttttaaacactcaaaccaatttttaaactttatttctctgttaccaaaaggtggaaaacttttcccttcctnaaaccttttgnaaaa

SEQ ID NO: 1706 - DNA, 280 bp, Homo sapiens
  misc_feature (1)...(280): n = A,T,C or G
tactcgacccacggngggagatccnagngaagtactnctatgccctctatgagctggtngtacgaggcaactgcttctgctacggacacgcctcagagtgtgcacccgccccaggggcaccagcccatgctgagggnatggttgcactgaagcttgcanntgcaaancacaacacnacngtgggtcttnaacttgnnancatgtgtnagggattttctatntgtgacactgnccctggcntncnggtttgagggacngccatacgtcatgcctgtaggaa

SEQ ID NO: 1707 - DNA, 476 bp, Homo sapiens
gtcaaggtgaaggtggagccctcaggcatcacattgtggagacccccctgagaggttctgctcccatgagaatccctacctatgcagcaacgagtgtgacgcctccaacccggacctggaccacccgcccaccaccattcccgacaaggaggaggagggcctggccacctactggcagagcatcacctggagccgctaccccagcccgctggaagccaacatcaccctttcgtggaacaagaccgtggagctgaccgacgacgtggtgatgaccttcgagtacggccggcccacggtcatggtcctggagaagtccctggacaacgggcgcacctggcaagccctaccagttctacgccgaggactgcatggaggccttcggtatgtccgcccgccgggcccacgacatgtcatcctccagcgcgcaccgcgtgctctgcaccgaggagtactcgcgctgggcaggctccaagaag

SEQ ID NO: 1708 - DNA, 872 bp, Homo sapiens
  misc_feature (1)...(872): n = A,T,C or G
acccacgcgtccgcaccatggggaaggctgtggtcatcttaagacagcattcccagggaagcagggatgacagaaccccatagcatgagggcaggaggagtggatacaaggatgtggagaggggaaagactcccccattcctttccctcctccctcgtcatagaaagtgaggaccaaggcacccaaggtctgaccatctgtgtctccagagctcctgcatgtgactaacctctgtgtaaacttctccaaactgcacaccctgggtgacaggcccctgggaggccctcaagggacaccccctttctactactatgcattctatgagcttgtagccaaaggcaagttccctgttgccttgggaacacctaataagtgcagttctgcacctggaaccccaagccaatgtggtgaggacaatgggaggggcattctgttgctggtgggttnggcaagctgggactccagagcaggcctgccttgccctcctccctatcaggtacatgggctttgcatctgtccccaccagtcggtgcacactgtgagtgctgccaagacctgcaccaggatcatccatgacatgcagcagagcctgggcacccccatgcctgctgggatgaatgccatgctctactctgcctggccatacctgccacaggtccgcccaccccatatctacctttctggttctgcctcagaatntgagtgccatgggcatgtctaacagttnttcacttttgacacagctgtgttgtctggtaacccctacaacaagtgttcggttgtctggggcattgctgggggaagtaagagcttgaagatatactgttggcccaggaccaaggggtgaatcaataaaattagtttgtagcaga

SEQ ID NO: 1709 - DNA, 464 bp, Homo sapiens
  misc_feature (1)...(464): n = A,T,C or G
ncgcgtccggcaattccngtaccgaaactggtacacangatgaaccttcctgcggaagtgaaaagtgtgttgtgatgtatcaccaaccaactgccaatcctggccttgggggtccctacctttaccagtggaatgatgacaggtgtaacatgaagcacaattatatttgcaagtatgaaccagagattaatccaacagcccctgtagaaaagccttatcttacaaatcaaccaggagacacccatcagaatgtggttgttactgaagcaggtataattcccaatctaatttatgttgttataccaacaatacccctgctcttactgatactggttgcttttggaacctgttgtttccagatgctgcataaaagtaaaggaagaacaaaaactagtccaaaccagtctacactgtnggatttcaaagagtaccagaaaggaaagtggattnggaagtataataac

SEQ ID NO: 1710 - DNA, 259 bp, Homo sapiens
  misc_feature (1)...(259): n = A,T,C or G
nccgtccggcgcgctaaccagggtcaagtctggatnggaggcaangatcacacggctcgggtcgctgcagacgctttcantgggttgacggcagccgctggaactnngcgtactgggntgctnaccagccctggtcccgcggtggtcactgcgtggccctgtgtacccgaggaggctactggcgtcgagcccactgcctcagaagacttcctttcatctgttcctactgagctggtcccagccagcagttcagagctgc

SEQ ID NO: 1711 - DNA, 530 bp, Homo sapiens
cggccccggccctcagcccccgctctagcttcgccagtagctcggccagcgacgcgagcaagccgtccagcccccggggcagcctcctccccgactccgcgcggacaaccctagctgaatgagccgtcgggtctggaggagccaccaggtcctttcgttccggaggccgcccgggcccggatgcgggagccagaggccagggaggactacttcggcacctgtatcaagtgcaacaaaggcatctatgggcagagcaatgcctgccaggccctggacagcctctaccacacccagtgctttgtttgctgctcttgtgggcgaactttgcgttgcaaggctttctacagtgtcaatggctctgtgtactgtgaggaagattatctgttttcagggtttcaggaggcagctgagaaatgctgtgtctgtggtcacttgattttggagaagatcctacaagcaatggggaagtcctatcatccaggctgtttccgatgcattgtttgcaacaagtgcctggatggcatcccctt

SEQ ID NO: 1712 - DNA, 309 bp, Homo sapiens
gaagagtcctctggggaggaccccaagggccggagacccaaagatcatgatattccaaatggattgtggaagagaaaccttatatttaccagggtgggggcgactggcctttttcccatgtgtggcagtctgagcttaggcacacacaggagggttccaggactttctgaacatctgattctgtatcttcagtatatatattttgtttgtttagagatgggatctcaccatgttgcccaggctagtcttgaactcctgggcgtcgaatgatcctccaaccttgcctcccaaagtctgggatataggcta

SEQ ID NO: 1713 - DNA, 822 bp, Homo sapiens
  misc_feature (1)...(822): n = A,T,C or G
cccgtccgaaaatggaagagggtgcaagtcccctcctggggccccagacgccccctcctttcttgctgcctggagcaggggcagtgctgttagtggctactcctggtgtgaacagcccatcctggccaccttccacaggaaacctgacctgaaggacagaagaggaaggaagcaggctttgccacaaatgtcagtgcagaactctggctggccccaccaagaagacagccccaagccccaggatccaggtccaccagccaactcagacagtgactcaggccacctgccgggggaggaccctgaggatacccatgctcaggtagtagagtcgtgcccttcctctgagaccaacatgtcctctatcctgtggagtggccacccttttccaccaacccggaggtagtttgacttcgtgcctaatctcttgttgcctttttctcttttcaggaattcctgtctctgcacctgcttagaacatggggttttgactttaaactcattcacatgagtattcattatctctcctagggggtctgtattgtcaaaccagactctaggggctttggccccaaggcgttgaagggggttaagaagggaaaagcataagaagggaagctgttttggggtgtggggccctcccagcctccctcaaggaagaccacacatgcaggcatcagtcagctatccttgcactcagtgaggatctgcaaggaggaccctcccaaatggagggcatgcttagaagctgctctagattggagaagangtggcaatgatgagggggaaagaaggagaaaggaaagaaaaacctagtttcactcc

SEQ ID NO: 1714 - DNA, 484 bp, Homo sapiens
  misc_feature (1)...(484): n = A,T,C or G
ccncgcgtccggtctcctcagggtcctgcagttctgagcttgggttccctttgcctggacaccaaccaagcccccaactggactggacttcagaccctcctgcagcaactccctccgcaggacattgatgagcgctactgcctggcccttggggaggaggagcgggccgagcttgcagctcttctgtgccaggcggaagcaggaagccctgggacagggggtagcccgcctggtacttcccaagcttgaaggacacacctgtgagaagagttgctgcgcccgcgctgcccggcttgtgaccagctgatcttctcctggcgctgcaccgaggcggagggacagcgctggcatgagaaccacttctgttgccaggactgcgccgggcctctgggcgggggacgttatgccctgcctggggggaagcccctgctgccccagctgcttcgagaaccgctacttggatgcaggctcgagctgggccggg

SEQ ID NO: 1715 - DNA, 340 bp, Homo sapiens
tggaagaatttgtcaagcaatataagacgcgaggccctcggcgtgggagaagtggccctcccggggcagggtggcttgcccaaggaggaggggaagcagcaggaaaagccagagggggcagagaccactgctgctaccaccaacggcagtctcagtgacccgtccaaagaagtggaatacgtctgcgagctctgcaagggagcggcccctcctgacagccccgtggtctactcggacagggcaggctacaacaagcagtggcaccccacctgctttgtgtgtgccaagtgctccgagccgctggtggacctcatctacttctggaaggatggtgcaccct

SEQ ID NO: 1716 - DNA, 825 bp, Homo sapiens
  misc_feature (1)...(825): n = A,T,C or G
acgcccccggagcatgtgtccaagactccctgctctagagaaattcgatgagtccaggaacatttgagggactctgcagtgggggaggccagagagaagggcactgggtcctacatgcccagagctcaagtcagaacacagggaacttggtagtcccaggctggttcctacttctccccaatccctgatctgggagaaactgtggcccaggagagtgtccctttgtatcctgccactctggactctgggcagacccccagttcctcccctccaggctgtacctggtcacaagccgggcagcgcgggcgcagcaactctgcatgatgacggccgcagtagagttgtccatcatggtagaagtagatgaggtttatcagggcctggcacacaggcatgcagcaaagcaaggctggtgccagcagcgctgttcccctgcccgggctgcaaacactccgtactcccctggcttcagcaactccctacactgtcagaggggaggtgctgaggtggtcggagtaagcactaccatcctaacttccctccttgctcttgcaatccgatcccaacctgttctcgccataccctagcaagcccacatccactgnaacctataccaagagcttgnaaacttggtttctgtttttcctgtttcccaaccagaatcccagaagctagcccagncccttctgcagaaatgagagggcaaagaatagaggaaggggaatttngggggaggggtgctacataccttctcacaggtgtgtccttcaaagcttgggaagtatcaggcgggntaaaccctgtttcagggntttctgctttcgc

SEQ ID NO: 1717 - DNA, 194 bp, Homo sapiens
  misc_feature (1)...(194): n = A,T,C or G
gcctgccgcccctgcgccgccgaagccagctgccataaatgcngaactggggaggaggcaagaaaatgtggggtgtgtcanaaanacggtttactttgcngaaaaaggttcagtgcgaaaggnaacagcttccataaatcctgcttcctgtgcatggtctgcaagaaagaatctggacagtaccactgtggtcg

SEQ ID NO: 1718 - DNA, 298 bp, Homo sapiens
  misc_feature (1)...(298): n = A,T,C or G
cctcgaggtgtgcaagagatgtgcccgctgccaccttggcatttccgcctnggngatggtcatgcgcgcccgagactctgtctaccacctgagctgcttnacctgctccactngcaacaagactctgaccacgggcgaccatttcggcatgaaggacagcctggngtactgccgcncccacttntngaccctctngcangganagnatccaccgcagntgagctacacggagctggcggccaagagcggcggcctggncctgccttactttaacngaacgggcaccgtgcaaaaaggg

SEQ ID NO: 1719 - DNA, 410 bp, Homo sapiens
  misc_feature (1)...(410): n = A,T,C or G
gcgtccgaatcgntcttctgcnggnatcatgaacgacaccgtaactatccgcactagaaagttcatgaccaaccgactacttcacagganacaaanngaggctcnagattgtggaccgctttctgctctatgccatggacagatattggcacagccggtgcctcaagtgctnctgntgncangcncagctggncgacatnggcacgtnntgttacaccaaaagtggnatgatcctttgcagaaatgactactttagggtatttggaaatagcngngcttgcagcgcttgcngacagnntattnctgcgagtgaactcggtatgagggncgcaaggnantgtgtatcatcttaagngttttacatgctctacctgccggaatcgnctggnccctgagagatcgggttcact

SEQ ID NO: 1720 - DNA, 624 bp, Homo sapiens
  misc_feature (1)...(624): n = A,T,C or G
gaccncgcgtccgatccggaccgcttgaaagtgggggaaagtgccggcgcctccgccaccggggaaagccgctccgcagcgccgaggccagcagccacccgagatacctggggaagcccggaacaggcgccggggcgtgcggcccgtggcatgaggttgtgaacgccacccgccccccaccaccccactccgggcagcccagcgccaggccagagattgcccaaggactggaccggctgagtcttggtccggaccagactcgccctgcagctgctgagacaagaggcgaagggcagcggagggcccggcaggcccgagggccaggggcccaaagggagggcaaggcggccgaagccgccggggcgcggggctatgatggtgcactgcgccggttgcgagcggcccatcctcgaccgctttctgctgaacgtgctggaccgcgcgtggcacatcaaatgtgttcaagtgctgcgagtgcaaaaccaacctctcggagaagtgctttctcgcgcgagggcaagctctacttgcaaaaatgactttttcaggcgctttggcacgaaatgcgccggcttgcgcgcaaggcatctcgcccaagcgaccttgtggcgcaagggcccggag

SEQ ID NO: 1721 - DNA, 453 bp, Homo sapiens
cctcccacaggccggccttggccgagctggcgactcggcggtgctggtgctgccgccttccccaggccctcgttcctccaggcccagcgtggactcggaagggggaagcctcctcttggacgaggactcggaagtcttcaagatgctccaggaaaatcgcgagggtcgggcggccccccgacagtccagctcctttcggctcttgcaggaagccctggaggctgaggagagaggtggcacgccagccttcctgcccagctcactgagcccccagtcctccctgcccgcctccagggccctggccacccctcccaagctccacacttgtgagaagtgcagtaccagcatcgcgaaccaggctgtgcgcatccaggagggccggtatcgccaccccggctgctacacctgcgccgactgtgggctgaacctgaagatgcgtgggcacttctgggt

SEQ ID NO: 1722 - DNA, 459 bp, Homo sapiens
  misc_feature (1)...(459): n = A,T,C or G
gtccatattcatatatttatagagctagtatgtcaaaaactttacacagtgacaccattagcccctggcccacccctctccttcccacttctgtgttcgaccctacttagaccctcgcacacaaaggttgatcaaaggcagtggccacctcagactagtgcaatgccagtcctgcaggggagaggcctggcaaggtgagggtgagtctcccacagtccaagacaggtcccagaccttggcccacccagcgaggacaaaggggcctcaggtctccaaacttagctcatgtaagagcaactgcccaccattgttccctgccatgccaacttatataggcatgacccggggcccagcagttgagggcaggntgaggggcatnggcgggnttcagggccnggagnttgaggggttggcaggttncgggagttaggcgttgggcggggcattgtttttnacatt

SEQ ID NO: 1723 - DNA, 510 bp, Homo sapiens
  misc_feature (1)...(510): n = A,T,C or G
tcccgccctcccccgggccctcgttcctccaggcccagcatggactcggaagggggaagcctcctcctggacgaggactcggaagtcttcaagatgctgcaggaaaatcgcgagggacgggcggccccccgacagtccactcctttcggctcttgcaggaagccctggaggctgaggagagaggaaccaggctgtgcgcatccaggagggccggtaccgccaccccggctgctacacctgtgccgactgtgggctgaacctgaagatgcncgggcacttctgggttgggtgacgaagctgtactgtgagaagcatgcccgccagcgctactccgcacctgccaccctcagctctcgggcctgagccccccatgccctcagcctgcctcactgctgggccagggtcatgcctatataagttggcatggcagggacaatggtgggcagttgctcttacatgagctaaagttnggagacctgaggcccctttgtcctcgctgggtgggccaag

SEQ ID NO: 1724 - DNA, 492 bp, Homo sapiens
  misc_feature (1)...(492): n = A,T,C or G
gaccacgcgtccggcgcaaggagcgggcgcggagccggcgggcgggcggaggatagcgcgggcgcggcacctgcgggcccgagggtctggctgtcgcagcgccgggccgccccgactccgagcggctgctgagatgagtgcagtgtcgcagccccaggctgctcccagcccgctggagaagtcgcccagcacggcgatcctgtgcaacacgtgtgggaatgtgtgcaagggcgaggtgctgcgggtgcaggacaagtacttccacatcaagtgcttcgtctgtaaagcatgtggctgcgacctggccgagggcggcttcttcgtgcggcagggcgagtacatctgcacgctggactaccagaggctctacggcacccgctgcttcagctgcgaccagttcattgagggtgagggtgggtgtcnggcgctgggcaagacctaccaccccgactgcttcgtgtgttgcccgnctgccggcttgcccttcccccc

SEQ ID NO: 1725 - DNA, 604 bp, Homo sapiens
  misc_feature (1)...(604): n = A,T,C or G
tgcaagtccagagagcagggaactaccttaantattctactcaaacttatgtctcaaagttccccaatttcccaagaagggagagatagaggccacaatccagggggccatctcttaaggtaccaataattttccagaccacaagcactaatgcacacgccataaaacccagcacttcgggaggccgaggcgagcggatcttgaggtcaggagattgagaccatcctggccaacacggatcaaaccaaaatgacaactgctcacttttactgtcaatactgcacagcatcacttcttgggaagaaatatgtactaaaggatgacagtccatactgtgttacatgttatgatcgtgtattttctaactattgcgaggaatgcaaaaaaccaattgaatctgattctaaggatctttgttacaaagaccggcactggcatgaaggatgcttcaagtgcaccaaatgcaatcactctttggtggaaaagccttttgctgccaaggatgagcgcctgctgtgcacggagtgctattctaatgagtgcttcttcaagtgctttcactgcaagaggaccatcatgcctggttnccgcaaaatgggaattt

SEQ ID NO: 1726 - DNA, 724 bp, Homo sapiens
  misc_feature (1)...(724): n = A,T,C or G
gtccacacaccagtcaactaccttgagtattctactcaaacttatgtctcagagttccccaatttcccaagaagggagagatagaggccacaatccagggggccatctcttaaggtaccaataattttgcagcccagtaggagtcatgtacacggtataagacttggaggaaatgcagggacccttctgttttctcctgcaaagttgaaaaagctgcatgcagttggaagggatcttcagatggtgctggtgactttctgttccttttggagttgacatgcatgtggattggaggaaaaataatcaacatatattctcctttcgtactgtttaaatcacaggaagaagcggctttaagacaaagatcaaaccaaaatgacaactgctcacttttactgtcaatactgcacagcatcacttcttgggaagaaatatgtactaaaggatgacagtccatactgtgttacatgttatgatcgtgtattttctaactattgcgaggaatgcaaaaaaccaattgaatctgattctaaggatctttgttacaaagaccggcactggcatgaaggatgcttcaagtgcaccaaatgcaatcactctttggtggaaaagccttttgctgccaaggatgagcgcctgctgtgcacggagtgctattctaacgagtgcttctncaagtgcttncactgnaagangacctcatgcctggttcccgcaaaatgga

SEQ ID NO: 1727 - DNA, 3236 bp, Homo sapiens
  misc_feature (1)...(3236): n = A,T,C or G
agaatctactgcccgacgaacagaaaaccctactaagaacnagctttctcagtcccctaaaaaggacagttatgttgaacccccaccaagaaggcccatgtcgcaaaaatctgaaattcacagagcaaacacttccccttctccacccaggagtcgctctgaacaacttgtcagactcaaagacaccactgcaaagttatccaaaggggccatcccatgtccagcagcaaccccggttccaattgtagagaagaggtctgaaatcatcatgtctcctgcaacacttcgtcgtcaaattaagatagaaactcgtggtagggactctccacctacaatcacaataccagtaaatataaatcatgctgctagtggttccttcagagaatctgtggacgctcaagaggaaatcaggaaagtggagaagaaagctacttatgttcataaagatggactaaattccactgatcacatggtgcccgacactgaaagttatgatgcagttgaaatcatccgcaaggttgcagtgcctcctcgcctgtcagagcacacacagagatatgaagcggccaaccgaactgttcaaatggctgaaaatttcgtgaatgaccctgaaaatgaaataaacagatggttcagggaatttgagcatggcccagtttctgaagcaaagtcaaatagaagagtttatgcaaagggagaaacaaaccataacatacaacaagaaagtcgtacattttgtaaggaggaatttggattaacatctttaggaaacacgagttttacagacttttcttgcaaacatcctagagaactgcgagaaaagattcctgttaagcagcccaggatctgctctgaaaccaggtctctaagtgaacatttctcaagcatggatgcatttgagagtcaaattgttgagtcgaagatgaaaacctcttcatcacatagctcagaagctggcaaatctggctgtgacttcaagcatgccccaccaacctatgaggatgtcattgctggacatattttagatatctctgattcacctaaagaagtaagaaaaaattttcaaaagacgtggcaagagagtggaagagtttttaaaggcctgggatatgcaaccgcagatgcttctgcaactgagatgagaaccaccttccaagaggaatctgcatttataagtgaagctgctgctccaagacaaggaaatatgtatactttgtcaaaagacagtttatccaatggagtgcctagtggcagacaagcagaattttcataagtcctgcttccgatgccaccattgcaacagtaaactaagtttgggaaattatgcatcacttcatggacaaatatactgtaaacctcactttaaacaacttttcaaatccaaaggaaattatgatgaaggttttggacataagcagcataaagatagatggaactgcaaaaaccaaagcagatcagtggactttattcctaatgaagaaccaaatatgtgtaaaaatattgcagaaaacacccttgtacctggagatcgtaatgaacatttagatgctggtaacagtgaagggcaaaggaatgatttgagaaaattaggggaaaggggaaaattaaaagtcatttggcctccttccaaggagatccctaagaaaaccttaccctttgaggaagagctcaaaatgagtaaacctaagtggccacctgaaatgacaaccctgctatcccctgaatttaaaagtgaatctctgctagaagatgttagaactccagaaaataaaggacaaagacaagatcactttccatttttgcagccttatctacagtccacccatgtttgtcagaaagaggatgttataggaatcaaagaaatgaaaatgcctgaaggaagaaaagatgaaaagaaggaaggaaggaagaatgtgcaagataggccgagtgaagctgaagacacaaagagtaacaggaaaagtgctatggatcttaatgacaacaataatgtgattgtgcagagtgctgaaaaggagaaaaatgaaaaaactaaccaaactaatggtgcagaagttttacaggttactaacactgatgatgagatgatgccagaaaatcataaagaaaatttgaataagaataataataacaattatgtagcagtctcatatctgaataattgcaggcagaagacatctattttagaatttcttgatctattacccttgtcgagtgaagcaaatgacactgcaaatgaatatgaaattgagaagttagaaaatacatctagaatctcagagttacttggtatatttgaatctgaaaagacttattcgaggaatgtactagcaatggctctgaagaaacagactgacagagcagctgctggcagtcctgtgcagcctgctccaaaaccaagcctcagcagaggccttatggtaaaggggggaagttcaatcatctctcctgatacaaatctcttaaacattaaaggaagccattcaaagagcaaaaatttacactttttcttttctaacaccgtgaaaatcactgcattttccaagaaaaatgagaacattttcaattgtgatttaatagattctgtagatcaaattaaaaatatgccatgcttggatttaagggaatttggaaaggatgttaaaccttggcatgttgaaacaacagaagctgcccgcaataatgaaaacacaggttttgatgctctgagccatgaatgtacagctaagcctttgtttcccagagtggaggtgcagtcagaacaactcacggtggaagagcagattaaaagaaacaggtgctacagtgacactgagtaaaatatctatggccactgacagtccacacttaggcactgagagatattgatgttctgaaataagattttatgaatttggatacccttttgaggaacttgatgtaaacatggtgttcagaaatctcgtgtctatctcaatgggatatttcttgtattacaccttgtcatttttttcacaatttatttacatctacttttgtttgaactggaatgaagagatgaaacactatggatatgttttccattcaaatggcactttagcatattgttctgttttcctgtaaaacatcatgggtgtgatttttatactgctgctgcttgtcacaattattataacttctctgtaatttcctctgaaataaaattgaatcacctgaggtgcaaaccaaaaaaaaaactcnacncnnnnnnnnnnnnn

SEQ ID NO: 1728 - DNA, 359 bp, Homo sapiens
  misc_feature (1)...(359): n = A,T,C or G
cgccnccggggaacgaggctccggcggggccgccgcctccccactcctctcggctctgtcccggggcccggcgggggctggggaggggccgggcgcggcggtggaccatggtgaatccgggcagcagctcgcagccgcccccggtgacggccggctccctctnctggaagcggtgcgcatgctgctgggggcaagattgcggaccgctttctgctctatgccatggacacgttattggcanagccggtgnctnaagtgntnctgangccaggcgcagctggttgacatcgactacgtcctgtanacaccaaaagtggcatgatcctttgcngaaatgactcattaggttatttggaaaa

SEQ ID NO: 1729 - DNA, 476 bp, Homo sapiens
ggcgcggggaggcgctgggctaaggctgtgcggagccagttcagcagccgccgccgcctgcgttccctccccccctcccccaggtgatggcccagccagggtccggctgcaaagcgaccacccgctgtcttgaagggaccgcgccgcccgccatggctcaagtctgacgccgaggccctggcaggagctctggacaaggacgagggtcaggcctccccatgtacgcccagcacgccatctgtctgctcaccgccctctgccgcctcctccgtgccgtctgcaggcaagaacatctgctccagctgcggcctcgagatcctggaccgatatctgctcaaggtcaacaacctcatctggcacgtgcggtgccttcgagtgctccgtgtgtcgcacgtcgctgaggcaagcaagaacaagctgctacatcaagaacaagggaagatcttctgcaagatggactactttaagccgattcg

SEQ ID NO: 1730 - DNA, 641 bp, Homo sapiens
  misc_feature (1)...(641): n = A,T,C or G
ctcgcgcccgcgccctcctcgtacccgtgcgcccccggagaccgatcccgccccgcggcccaggccgggcctggctggggccgggctggcggggccctcccgactgacttccccttgcagaacccagcgggtgccgcttctccacccgaggcttccacctccaacgagccatgttccaggctgcaggagccgcccaggccaccccctctcatgacgccaaaggcggcggcagcagcacggtgcagcgctccaagtccttcagcctgcgggcccaggtgaaggagacctgcgccgcctgccagaagaccgtgtaccccatggagcggctggtggccgacaagctcattttccacaactcttgcttctgctgcaagcactgtcacaccaagctcagcctgggcagctacgccgcgctgcacggggagttctactgcaaaccccacttncagcagctgtttaagagcaaaggcaactacnacgaggggtttggccgcaagcagcacaaggagctctgggcccacaaggaggtggaccccggcaccaagacggcctgaggcctctgtaaccttcacccctttgcggaangcctggaacccgcaggggggaangtggtnaagggagccatgggnctttgccttggg

SEQ ID NO: 1731 - DNA, 392 bp, Homo sapiens
  misc_feature (1)...(392): n = A,T,C or G
gtccggcagcagctcgcgcccgcgccctcctcgtacccgtgcgcccccggagaccgatcccgccccgcggcccaggccgggcctggtgagagccgcggggggaggggccgngtccggctccggaaccgggagaggcgccgaggggtgtgggaacccagcgggtgccgcttctccacccgaggcttccacctccaacgagccatgttccaggctgcaggagccgcccaggccaccccctctcatgacgccaaaggcggcggcagcagcacggtgcagcgctccaagtccttcagcctgcgggcccaggtgaaggagacctgcgcccgcctgccagaagaccgtgtaccccatggagcggctggtggccgacaagctcattttccacaactttt

SEQ ID NO: 1732 - DNA, 1069 bp, Homo sapiens
  misc_feature (1)...(1069): n = A,T,C or G
cccgtccgagccccggacctacaagcggatgccggggcttctcctggctgccccagcgcccgcggatctgtctgccgaggcgcgcttccactcccagagtttattcctcgttccttcttcagtcctncccgtcggaggacccggttgccatggtgaaggaaaaagtggcccaccctcaggaccctcaccacccatcagagaagcctgtcattcactgccataaatgtggggagccttgcaagggtgaagtgcttcgggtccagaccaaacatttccacatcaagtgtttcacctgcaaagtgtgtggctgtgacctggcacaagggggcttcttcataaagaacggagagtatctctgcaccctggactaccagcggatgtacgggacacgctgccatggctgtggggagttcgtggagggcgaagtggtgactgctctgggcaagacctaccatcccaattgctttgcttgtactatctgcaagcgcccgtttccacccggagaccgagtcacattcaatgggagagactgcctttgtcaactctgtgcacagccgatgtcgtccagtccgaaagaaaccaccttctccagcaattgtgccggctgcggaagagatatcaagaatgggcaggcgctgctggcgctggataagcagtggcacttggggtgctttaaatgcaagtcctgcgggaaggtcctcaccggggagtacatcagcaaggatggtgctccgtactgtgaaaaggactaccagggactctttggggtgaaatgtgaggcgtgtcaccagtttatcacagggaaagtcctggaggcaggtgacaaacattaccaccccagctgtgcacgatgcagcagatgcaaccagatgttcacagaaggagagtcaacgaatactcaatccccaactccatcaacagaagggtaccaggatgttcgggatcggatgatcatcggtccacgagccagggctccatcaactcccctgtgtacaagccgccacagctacactccaaccacgtcccgcttttccccagcatttccacagacctgatcaaggaatcaaca

SEQ ID NO: 1733 - DNA, 1299 bp, Homo sapiens
  misc_feature (1)...(1299): n = A,T,C or G
nnnntttttttttttagagaatctggatctattgaaacatgtttaaaacggggttggtcacaacaggatgggcacaaatgggagcgggggaggggagtggggccgcaccagcccctgccagtgcctgaggctgcagcctggcgagtgcttttgcttctgcttctccacgctggtggttcgagatggtcccaagccccactggggcaggccctgccttgccctgcagaggcagggtggctccacttccccatctcctcccccatgggctgcaggggcatttatgatgcccaacaggtggcactgtcgcgctccttcctccctgtctccgtggctcagaaacaggttaagggtagaggtagatggggagacgtgggggccacacagtctccggtggcagtgagggagcttgggaccctgaggggggcatgctgactccttgctggagaaaaggcacctagataggggagctgggcttgggggcctcccagggggtcctggggtgaggtggggagggaggctgaacgaagcaggaagcagggtggtgggcagaccccaatcctggtttccaaaccctcaccggctgcgggagaaggaagaaggaaggagtcctggagcagagccctgccctggtcccctacgcctgagcaagcctcatccccttcccacctggcccccacgcaagcccagctcgacctcctttccaccttccccctgccggctccaggccttccgcagagggggtggaaggttacagaggcctcaggccgtcttggtgccggggtccacctccttgtgggcccagagctccttgtgctgcttgcggccaaacccctcgtcgtagttgcctttgctcttaaacagctgctggaagtggggtttgcagtagaactccccgtgcagcgcggcgtagctgcccaggctgagcttggtgtgacagtgcttgcagcagaagcaagagttgtggaaaatgagcttgtcggccaccagccgctccatggggtacacggtcttctggcaggcggcgcaggtctccttcacctgggcccgcaggctgaaggactgtgcgggaagctcagccaggtgctgccccagtgctcatcccgctccctcacacccctcctcccgcacacccggccccaggcccctaccttggagcgctgcaccgtgctgctgccgccgcctttggcgtcatgagagggggtggcctgggcggctcctgcagcctggaacatggctcgttggaggtggaagcctcgggtggagaagcggcacccgctgggttccggacccgaggtcgac

SEQ ID NO: 1734 - DNA, 418 bp, Homo sapiens
ttttatagtgctgtatttgtattgggtgaatatgtggaaattagggagttctatgcttttgatagagacaggccaatttacttgctcatccttgaatgcaggtttcttgacattccttttcactgttgaatctatttcctgagccattacagccactgaaccaaaatcgggcacaagagttgacctgtttgtcataataccatcgaaccacatattcaccacagtttccaggcttcaaggcttccaaacatctaggatcctctgccccatccacaggggtgctgagcagtggccttggagtggtggtggcctcagatgaggtagtggcaggcacatcatcagcccacgttggctctggagccttatcatcttcatcctggtctctggtgacactcaatgactcagaaatttctttttg

SEQ ID NO: 1735 - DNA, 705 bp, Homo sapiens
  misc_feature (1)...(705): n = A,T,C or G
cgggtaccggcagcagctcgcgcccgcgccctcctcgtacccgtgcgcccccggagaccgatcccgccccgcggcccaggccgggcctgaacccagcgggtgccgcttctccacccgaggcttccacctccaacgagccatgttccaggctgcaggagccgcccaggccaccccctctcatgacgccaaaggcggcggcagcagcacggtgcagcgctccaagtccttcagcctgcgggcccaggtgaaggagacctgcgccgcctgccagaagaccgtgtaccccatggagcggctggtggccgacaagctcattttccacaactcttgcttctgctgcaagcactgtcacaccaagctcagcctgggcagctacgccgcgctgcacggggagttctactgcaaaccccacttccagcagctgtttaagagcaaaggcaactacgacgaggggtttggccgcaagcagcacaaggagctctgggcccacaaggaggtggaccccggcaccaagacggcctgaggccttctgtaacctttccaccccctttgcggaaggcctggagccggcagggggaaggtgggaagggagggtcnagctngggctttgccttggggccaagtgggaaagggaatnaagntttgnttaagcgttaaggggacccagggcagggnttntgntttcaggacttcnttctttntttc

SEQ ID NO: 1736 - DNA, 523 bp, Homo sapiens
aactggcaatgaccaagagcaacaggaaatgacttagggaaagccccaaccgcaatccccccagcccctgcctgtcaacaccccccaccctgcaggctggggccgggctggcggggccctcccgactgacttccccttgcagaacccagcgggtgccgcttctccacccgaggcttccacctccaacgagccatgttccaggctgcaggagccgcccaggccaccccctctcatgacgccaaaggcggcggcagcagcacggtgcagcgctccaagtccttcagcctgcgggcccaggtgaaggagacctgcgccgcctgccagaagaccgtgtaccccatggagcggctggtggccgacaagctcattttccacaactcttgcttctgctgcaagcactgtcacaccaagctcagcctgggcagctacgccgcgctgcacggggagttctactgcaaaccccacttccagcaagctgtttaagagcaaaggcaactacgacgaggggtttggccgcaagcag

SEQ ID NO: 1737 - DNA, 155 bp, Homo sapiens
  misc_feature (1)...(155): n = A,T,C or G
gcgtncgtacgacgaagggtttggccgcaagcagcacaaggagctctgggcccacaaggaggtggaccccggcaccaagacggcctgaggcctctgtaaccttccaccccctctgcggaaggcctggagccggcagggggaaggtgggaaggagg

SEQ ID NO: 1738 - DNA, 337 bp, Homo sapiens
  misc_feature (1)...(337): n = A,T,C or G
tttttgagggccgacnccggagngggnctaaaatcacatggctgcagttgtagcacnacgtcccntaagagctggttgtagtgagtctcgcagggggccgggncnttcttctgatagtgccggtgccccaggaatggcttttnacactttggcacagacaaagtggctccacgtgccactgcttgcccagcgcgttgaccactcggccctcgatgggccggcggcaggccccacagtgggtgcagttgaagttggtcagggtggtaggcgtngntcctgaacatgaggggctgctcntcgatgaccaggtggcaccnctggcagatgtacttgccca

SEQ ID NO: 1739 - DNA, 436 bp, Homo sapiens
  misc_feature (1)...(436): n = A,T,C or G
gacctgtgtgatgtggagctggctgacctgggctttgtgaagaatgccggcaggcatctctgccggccttgccacaaccgtgagaaggccaaaggcctgggcaagtacatctgccagcggtgccacctggtcatcgacgagcagcccctcatgttcaggagcgacgcctaccaccctgaccacttcaactgcacccactgtgggaaggagcttgacanccnangcccgcnagctgaanggtgagctctactgcctgccctgccatnacaagatgggcgtccccatttgcggggcctgccgccggcccatcgagggccgagtggtcaacgcgctgggcaagcagtggcacgtggagccagggaccccacctgccacgggagccaggagacccnagtncacacacacgggtgggtaagcttgtgcccaccttttctnt

SEQ ID NO: 1740 - DNA, 871 bp, Homo sapiens
  misc_feature (1)...(871): n = A,T,C or G
gcatttctggggcacggcaactatgagaagaaggcacccgcccactcctacactcacaacaaccagccacactgacagactcactacaaacagctcttctgggacgtctgctacaactgcagccatgtgattgaaggcgatgtggtgtcggccctcaacaaggcctggtgtgtgagctgcttctcctgctccacctgcaacagcaagctcaccctgaagaacaagtttgtggagttcgacatgaagcccgtgtgtaagaggtgctacgagaagttcccgctggagctgaagaagcggctgaagaagctgtcggagctgacctcccgcaaggcccagcccaaggccacagacctcaactctgcctgaaggccctcttgcgcagctgcctctcggcccctccgccttctcccctcccgctgtccatgcttggccccctcgtccccatccacctgtgccctccgcatcttaccctccctttctctttcctcattgccttctcccttcctgttccctcatctctgccttccccatgtctctcctctccttggccgtggcttctgtctgtgaggaggcaggagctggggagtgggagcctatgaccccacgtctgacagccatgtccacctgtgcccacagcttccgcccacagacctccagggacaggagcaaattgcaccacagctccccgcctggcctggccctccccaggcggctcagtggctcatgctgtcctgtgagagcccctgccccagagcggccccactaagcgcatgtggctcctgggctacccacagccagggcagcctgctggagccacagggccagggccatgcagatggaggcctntgggagccacctccaatccctacca

SEQ ID NO: 1741 - DNA, 821 bp, Homo sapiens
gacccccgtcctggcgggcgggcgctcggctggcggctgcagcatcagagggacgcccgcggcaaccccggcaacccagggctcggcgtcgctgccaccatgacgggaagcaatatgtcggacgccttggccaacgccgtgtgccagcgctgccaggcccgcttctcccccgccgagcgcattgtcaacagcaatggggagctgtaccatgagcactgcttcgtgtgtgcccagtgcttccggcccttccccgaggggctcttctatgagtttgaaggccggaagtactgcgaacacgacttccaaatgctgtttgctccgtgctgtggatcctgcggtgagttcatcattggccgcgtcatcaaggccatgaacaacaactggcacccgggctgcttccgctgcgagctgtgtgatgtggagctggctgacctgggctttgtgaaaaaatgccggcaggcatctctgccggccttgccacaaccgtgagaaggccaagggcctgggcaagtacatctgccagcggtgccacctggtcatcgacgagcagcccctcatgttcaggagcgacgcctaccaccctgaccacttcaactgcacccactgtgggaaggagctgacagccgaggcccgcgagctgaagggtgagctctactgcctgccctgccatgacaagatgggcgtccccatctgcggggcctgccgccggcccatcgagggccgaagtggtcaacgcgctgggcaagcagtggcacgtggagcactttgtctgtgccaagtgtgagaagccattcctggggcaccggcactatgagaagaag

SEQ ID NO: 1742 - DNA, 789 bp, Homo sapiens
gggctggcgggcgggcgctcggctggcggctgcagcagcagagggagacccgcggcaaccccggcaacccagggctcggcgtcgctgccaccatgacgggaagtttgaaggccggaagtactgcgaacacgacttccaaatgctgtttgctccgtgctgtggatcctgcggtgagttcatcattggccgcgtcatcaaggccatgaacaacaactggcacccgggctgcttccgctgcgagctgtgtgatgtggagctggctgacctgggctttgtgaagaatgccggcaggcatctctgccggccttgccacaaccgtgagaaggccaagggcctgggcaagtacatctgccagcggtgccacctggtcatcgacgagcagcccctcatgttcaggagcgacgcctaccaccctgaccacttcaactgcacccactgtgggaaggagctgacagccgaggcccgcgagctgaagggtgagctctactgcctgccctgccatgacaagatgggcgtccccatctgcggggcctgccgccggcccatcgagggccgagtggtcaacgcgctgggcaagcagtggcacgtggagcactttgtctgtgccaagtgtgagaagccattcctggggcaccggcactatgagaagaagggcctggcctactgcgagactcactacaaccagctcttcggggacgtctgctacaactgcagccatgtgattgaaggccatgttggtgtcggccctcaacaaggcctggtgtgtgagctgcttctcctgctccacct

SEQ ID NO: 1743 - DNA, 1176 bp, Homo sapiens
  misc_feature (1)...(1176): n = A,T,C or G
aagggcagcggcggccccgaggctcggggcggacggactgagccgcggggacgcggggtccccggcgcgcggcggttccggacctcagcgcgcagcctgcgggcagcccacgggccagcctggcggggtccgacggcggcggcggtggcggcagcgcccgatccagcggcatcagcctgggctacgaccagcgccacggcagcccgcgctccggtcgctcggacccgcgtcccggtcccgggccgccttcggtgggcagcgcccgctccagcgtttccagcctcggctcccggggctcggccggcgcctacgctgacttcctcccgcccggcgcctgccccgcgcccgctcgctccccggagcctgcggggccggcccccttcccgctgcctgcactcccgctgccccctggccgggagggcggcccaagcgcggccgaacggcggctggaggcgctcacccgggagctggagcgggcgctcgaggcgcgcacggcgcgggactacttcggcatttgcatcaagtgtgggcttggcatctacggagcccagcaggcgtgccaggcaatggggagtctttatcacactgactgcttcacctgcgactcgtgtgggagacgactccgtgggaaaggcgttctacaacgtggggtgagaaagtgtactgccaggaggacttcctgtactccgggttccagcagacggccgacaaatgcagcgtgtgttgacatctcatcatggaaatgatcctgcaggccctgggcaaagtcctaccacccaggctgcttccggtgctccgtgtgcaatgagtgcctggacggggttcccttcaccgtggacgtggagaacaacatctactgcgtgcgagactatcacacggtttttgcaccaaaatgcgcctcctgtgcccgtcctatcctccctgcacagggctgcgagacaaccatccgtgtggtgtccatggacagagactaccacgtggcatgttaccactgtgaggactgcgggctgcagctgagcggggaggagggacgccgttgctatcccctggncgggccacctaactgtgtcgtcgttgccacctgcggcgccttccaacctggggcctgttnccctnacccactgttgcacgttcaattgagctcttgagncaggggaaaacccgttccctggggcg

SEQ ID NO: 1744 - DNA, 479 bp, Homo sapiens
cccacacttcctcttaacctcatgctgcgtgcgggccggtgcggaatcgctccttcaactccgcggggcagtagagttagttagcaaagagcagaggccgggcgctcgaccctcgtccttctgcccccggccgcaaactttgctcacatctctctttctgcatggtggatattatttttcattatccttttctgggtgctatgggtgatcattccaagaagaagcccgggacggccatgtgcgtgggctgcgggagtcagatccacgaccagtttatccttcgcgtgtcgcccgacctcgagtggcacgccgcctgcctcaagtgcgccgagtgcagccagtacctggacgaagacgtgcacgtgcttcgtgagagacgggaaaacctactgcaagcgggactacgtcaggctgttcggcatcaagtgcgccaagtgccaggtgggcttcagcagcagcgacctggtgatgaaggcgcg

SEQ ID NO: 1745 - DNA, 366 bp, Homo sapiens
  misc_feature (1)...(366): n = A,T,C or G
cagatctgctcaagtctgcctttcaccgaatcacatgcaggaggctgcatgcaggaggctgcagaaattagatggctgggttgctggggttcctgttgagctgccatggctcccgcccgctcccagatcttcctgccttccttcccaacaggccaccctggagaaatgtgccacgtgctcccagcccatcctggaccggatcctgcgggctatggggaaggcctaccaccctggctgcttcaacttgcgttggtngtgtcacccgcggcctcngacgggcatcccctttcacagttgggatgcttaccggaggccaaggatcccacttgccatttggaggaacttttcaccaggggaaaggttttg

SEQ ID NO: 1746 - DNA, 443 bp, Homo sapiens
  misc_feature (1)...(443): n = A,T,C or G
ttggattctgaaagatcgaggtgcccaaaggaattttatggtcgtcggattttgaagacttgaactagactgggggttctccttgcatttcttgcctgttgcctatctttgtcctctctcttccggcttcgagatgaatgtgcagccctgttctaggtgtgggtatggggtttatcctgccgagaagatcagctgtatagatcagatatggcataaagcctgtttttcactgtgaagtttgcaagatgatgctgtctgctaataactttgtgagtcaccagaaaaagccgtactgtcacgcccataaccctaagaacaacactttcaccagtgtctatcacactccattaaatctaaatgtgaggacatttccanaggccatcantgggattccatgaccaagaagatggtgaacagtgtaaatcagtttttcattgggacat

SEQ ID NO: 1747 - DNA, 336 bp, Homo sapiens
gcgtacgcttgctcacacgcccagtgacctgccgaggtcggcagcacagagctctggagatgaagaccctgttcctgggtgtcacgctcggcctggccgctgccctgtccttcaccctggaggaggaggatatcacagggacctggtaccgtgaaggccatggtggtcgataaggactttccggaggacaggaggcccaggaaggtgtccccagtgaaggtgacagccctgggcggtgggaagttggaagccacgttcaccttcatgagggaggatcggtgcatccagaagaaaatcctgatgccggaagacggaggagcctggcaaatacagcgc

SEQ ID NO: 1748 - DNA, 338 bp, Homo sapiens
  misc_feature (1)...(338): n = A,T,C or G
gtcccacgcgtccgnggacgcgtgggcanatanggcancanctantcngtgtncgtgntggagaccgactangancagtacgcgctgctgtactgncagggcagcnagggncntggngaggacttccgcatggccaccctctacttncgancccanacccccanggctganttnaaggagaaattcnccgccttctgcnangcccanggcttcananangataccattgtcttcctgccccaancngataagtncatgacngaacaatangactccccanggctgaatctgggattttgtcatccnngtnacccccncgctctggatgtntctgctct

SEQ ID NO: 1749 - DNA, 525 bp, Homo sapiens
  misc_feature (1)...(525): n = A,T,C or G
gnggcaccatggccctgagtgtcatgtgtctgggccttgccctgcttggggtcctgcagagccaggcccaggattcaactcagaacttgatccctgccccatctctgctcactgtcccnctgcaacagacttccggagcgatcagttccggggcaggtggtacgttgtgggcctggcaggcaatgcggtccagaaaaaaacagaaggcagctttacgatgtacagcaccatctntganctacaagagaacaatagctacaatgtcacctccatcctggtcagggaccaggaccagggctgtcgctactggatcagaacatttgttccaagctccagggctgcccagttcactctgggaaatatgcacangtatnctcaggtacagagctncaatgtgcaagtggccaccacggactacaaccagttcgcatggtatttttccgaaagacttctgaaaacaagcaatacttcaaaattacnctggtatnggnagaaccaagggagctgtccctgaactgagggaac

SEQ ID NO: 1750 - DNA, 297 bp, Homo sapiens
  misc_feature (1)...(297): n = A,T,C or G
ccacgcgtccgcgcctncactcgagctggctccggnagaagaaggcggngttgtccatgtgcaagtctgtggnggcccctgccacggatggtggcctcaacctgacctccacctttctnaggaaaaaccagtgtgagacccgaaccatgctgctgcagcccgnggggnccctcggntcctacagntaccggagtccccactggggcagcacctactccgtgtcagnggnggagaccgactacgaccagtacgcgctgctgtacagncagggnagnaagggccctggcgaggacttcc

SEQ ID NO: 1751 - DNA, 472 bp, Homo sapiens
  misc_feature (1)...(472): n = A,T,C or G
cccgtccggntttaangcaaagnccggnggtaaaaatacgaagatcattactttgaatgggaagaagatnttnaagatgccctcagcattaggaaaactgcctggcctgaagactctagtccttcagaataacctaatccccaaagtgtgtccagagttatgcaacttgacccagttgacaacactaaatctgggaaacaaccttttagaagaagttccggaagagatgaaatatcttacatctctgaagaatctccatttatctggaaataggatctgtagatttgcacctggagcctgtgatggcttacaaaatttaatcctgcttaatctgaacaacaatcatcttacgcagcttcctcaagaagtcagcagattaaaaagtcttacttatatgagtataaattataaccaactagccagcattcctagagaactttgttttcttgagaatcttgttggaacttcaact

SEQ ID NO: 1752 - DNA, 261 bp, Homo sapiens
  misc_feature (1)...(261): n = A,T,C or G
acaatgggaatccaaggagggnctatnctgngcgggggggngctcgtcctggntctcttctgccattcangtcataccctgcagtgctacaactgtnctaacccaactgctnactgcaaaacagccattcaattgttcatctgattttnatgctgtgtctcattaccaaanctgggttacaagnctataacaagggtnggaagnttgancattgcaatntcaacnacatcacaaccctcttganggaaaatgagctaacct

SEQ ID NO: 1753 - DNA, 834 bp, Homo sapiens
tgcagcacagagcaatgtattgcaaaggagaaagaacattttgaaagtttgatgcagaagagataggacgccctgagagagaggattcagggccggctgcttgtaagggcgagacagcagagactggcaccagggaggctcctccatgggagtcttccatgattactcacagcgggtgggcagaggtgttgctaggaagcatgttctgggggggtcctctgggtgcacacgtgcagtagctgcacctgcttgctcatacgtcgcatgtgtcattagcatcttaaatctccaccaggggtgtgttttcttgccctctctcccagctcagggtctgcgctgctacagatgcttggcggtcttggaaggggcctcctgcagcgtggtctcgtgccccttcctggatggggtctgtgtctcccagaaagtgagcgtctttggcagtgagtccctggggtgccagggcagagggcaggttaagtgccgttgtggactcccagatctcttgctgcaagggagacctctgcaatgcggtggtcctggcagccggcagcccctgggccctcacagctgcaggggtcggggctcggaagtgctgggggcagttcaggttgaaggctgggcagcgtgcacttctccccccagcctccttggggcccgggcatcaccggaagcggagtttgttcccactttgtatcagtcgcaaagaaagagcacccaattggacaaaaggcaagcaggctgcgttcctggcccggagtggggaagagtgagcccctgccctgtcagggaagctgaggctgggggttgtaggagtcccgtgccgggagcggacgc

SEQ ID NO: 1754 - DNA, 598 bp, Homo sapiens
tcaccccacgcactcactgccaaagacgctcactttctgggagacacagaccccatccaggaaggggcacgagaccacgctgcaggatggccccttccaagaccgccaagcatctgtagcagcgcagaccctgagctgggagagagggcaagaaaacacacccctggtggagatttaagatgctaatgacacatgcgacgtatgagcaagcaggtgcagctactgcacgtgtgcacccagaggacccccccagaacatgcttcctagcaacacctctgcccacccgctgattctctcggcaccacgggaaccaccttctctactctcactgaacacccctgggatgtatctgtaaaaattggaacacctttcggctagaaaccagaggaagccgctcatgacacccgggagctcacagaggctctgaagtttctattcaagaaaacaactccagatggggctgatctggaagacaagtaacatcttccttttcttggtgctcgcctgccgtgctctaggtgcttttagagatgctggtctgtgtgctagggaagcgatgaaccatactgttagtctattaaacgtaactcaacctgaa

SEQ ID NO: 1755 - DNA, 731 bp, Homo sapiens
  misc_feature (1)...(731): n = A,T,C or G
tccggcatgcacccacggagtgtctcagcttctggaaccaacccaatcgtcccaagactcgtactctgcgcctagccatgagacgggaaggggaggagacacacctgtggtcgcggtcaggcacccagggcaaccgctggcacgaggcctgngccaccctttcccaccagcctggctcccatgcccagtaccagctgctgttcnagggcctccgggacggataccacggcaccatggcgctggacgatgtggccgtgcggccgggcccctgctgggcccctaattactgctcctttgaggactcagactgcggcttctcccctggaggccaaggtctctggaggcggcaggccaatgcctcgggccatgctgcctggggccccccaacagaccataccactgagacagcccaagggcactacatggtggtggacacaagcccagacgcactacacccgtcccagacggcctccctgacctccaaggagcacaggcccctggcccagcctgcttgtctgaccttctggtaccacgggagcctccgcagcccaggcaccctgcgggtctaccttggaggagcgcgggaggcaccaggtgctcagcctcagtgcccacggcgggcttgcctggcgcctgggcagcatggaacgtgcaggccgagcgagccttggaggatggtgtttgaggcagtggccgcaggcgtggcacactcctacgtggctctggatgat

SEQ ID NO: 1756 - DNA, 213 bp, Homo sapiens
  misc_feature (1)...(213): n = A,T,C or G
gtncgcggacgcgtgggtcgaccccgcgtccgggtcctatcatgtacagcacggaccctgaaaatgggcacatcntnaactgcattcaccgagcccancagaacacgtcggangtgtatcctcccttcttattntttctagctgttggaggtgntcaccacccncatatagcttctggcctgggcttggcctggattgttggacgagttcttt

SEQ ID NO: 1757 - DNA, 353 bp, Homo sapiens
  misc_feature (1)...(353): n = A,T,C or G
atgggatcaaagaaactggtaaggncatggttgccntgtggncnttcgcanccttnntaagcgggggncnagaanngnntnttttgccnntaangggnancncnaanncaggnnccnaaannggnaggancttcnaaagnaccggnancantngcntttnancgggntntncantgccaaccaaanctgggnaaatncnnncccnantttcntcgttgggctctggtntgcggggntactttgnagccaagttcctgntgcgttngctgnactgatgnacttgtttgtgaggcaaaagtactttgtcggttacctagganagagaacgcaaagcacccntggctacatatttg

SEQ ID NO: 1758 - DNA, 188 bp, Homo sapiens
  misc_feature (1)...(188): n = A,T,C or G
gcccaggtgaactgcaananagaacttncngatgntcctagccacgctctgggtcgncggnatcttntttaatgaaggggcggcggccctgtgcggcctggtctacctgtncgcgcgcctccgctacttacagggctacgcgcgctccgcgcagttnaggctggnaccgntgtacgcgagcgcgcgcg

SEQ ID NO: 1759 - DNA, 1287 bp, Homo sapiens
  misc_feature (1)...(1287): n = A,T,C or G
actcccgctaaggctggtgtggtttgtagccttcctgcaagaacttccattattgctgctgcaaatccagttggaggacattacaataaagccaaaacagtttctgagaatttaaaaatggggagtgcactactatccagatttgatttggtctttatcctgttagatactccaaatgagcatcatgatcacttactctctgaacatgtgattgcaataagagctggaaagcagagaaccattagcagtgccacagtagctcgtatgaatagtcaagattcaaatacttccgtacttgaagtagtttctgagaagccattatcagaaagactaaaggtggttcctggagaaacaatagatcccattccccaccagctattgagaaagtacattggctatgctcggcagtatgtgtacccaaggctatccacagaagctgctcgagttcttcaagatttttaccttgagctccggaaacagagccagaggttaaatagctcaccaatcactaccaggcagctggaatctttgattcgtctgacagaggcacgagcaaggttggaattgagagaggaagcaaccaaagaagacgctgaggatatagtggaaattatgaaatatagcatgctaggaacttactctgatgaatttgggaacctagattttgagcgatcccagcatggttctggaatgagcaacaggtcaacagcgaaaagatttatttctgctctcaacaacgttgctgaaagaacttataataatatatttcaatttcatcaacttcggcagattgccaaagaactaaacattcaggttgctgattttgaaaattttattggatcactaaatgaccagggttacctcttgaaaaaaggcccaaaagtttaccagcttcaaactatgtaaaaggacttcaccaagttagggcctcctgggtttattgcagattaaagccatctcagtgaagatatgcgtgcacgcacagacagacagacacacacacacacacacacacacacacacacacacacacacacagtcaaatactgttctctgaaaaatgatgtcccaaaagtattataataggaaaaaagcattaaatataataaactaatttaagaagtgataaagtctccagatgcagtagctcacactgtaatcacagtgactcaggaggctgaggtgagaggattccttgaggccagggttcgagaccaaccttgggcaacatagcaagaccccatttcttaaaaagtttattanatttaatgctttttccnattataa

SEQ ID NO: 1760 - DNA, 621 bp, Homo sapiens
  misc_feature (1)...(621): n = A,T,C or G
ctctttttatttacacgggagcactccacagtgttttgcagctttcctatttcactaaactacagcccattctgctctgataagtagcagcgttgccctcgattggctgcacccgagttctgaccctcctcctccagcgagggcctcggcagccagcaagatgggctcccgctcccggaatggactcggaaactttaactgcggctccacctgctggtgtggattaggacaaaggcggagaacaaagtctgacggtaactgctgtaaaagactcaggagaatggaatttggaggctggggcattagttcttgcagatgcgggcctttgctgtattgatgagttcaatagcctcaaagagcatgataggaccagtatccatgaagcaatggagcaacaaaccataagtgttgctaaggctggcctcgtgtgcaagctgaacacaaggaccaccatcctggcannanccaaccccaaaggccaataccgacccccaggagtcccgtgtntgtgaacattgccctcggcagcccactcttaagtcgatttgacctgatcctggnttngcttgataccaagaatgaagactgggatccgnatcatttcctnctttatcttaaaaa

SEQ ID NO: 1761 - DNA, 445 bp, Homo sapiens
  misc_feature (1)...(445): n = A,T,C or G
ccacgcgtccgaaaatacattgctctaagagggacacgtggttcgtgtcacgtaatataaagcctctttgcaccaagatggcttttctttgtgctgcatgtggagaaattcagagctttcctcttccagatggaaaatacagtcttcccacaaagaatccaggaattgatgtctgatgatcagagagaagcaggtcggattccacgaacaatagaatgtgagcttgttcatgatcttgtggatagctgtgtcccgggagacacagtgactattactggaattgtcaaagtctcaaatgcggaagaaggttctcgaaataagaatgacaagtgtatgttccttttgtatattgaagcaaattctattagtaatagcaaaggacagaaaacaaagangttctgaggatgggntgtaagcatgggaatgtttgatggagtttctnact

SEQ ID NO: 1762 - DNA, 986 bp, Homo sapiens
  misc_feature (1)...(986): n = A,T,C or G
cgccccgcgtccgccccgcgtccgagaagatttcaaagctggaaaaggggaagaggtggtgggaacttctcaggaaaatggagagaaagagaacacagacctgatctgagtaaaaccacaggaaaacgtacttctgaacaaaccccacagtttttgctttcaacaaagaccccacagtcaatgcagtcaacattggatcgattcataccatataaaggctggaagctttatttctctgaagtttacagcgatagctctcctctcacagttacgatggactggcagtcaatcaaaatccaggaattgatgtctgatgatcagagagaagcaggtcggattccacgaacaatagaatgtgagcttgttcatgatcttgtggatagctgtgtccccgggagacacagtgactattactggaattgtcaaagtctcaaatgccggaagaaggttctctgaaataagaatgacaagtgtatgttccttttgtatattgaagcaaattctattagtaatagcaaaggacagaaaacaaagagttctgaggatgggtgtaagcatggaatgttgatggagttctcacttaaagacctttatgccatccaagagattcaagctgaagaaaacctgtttaaactcattgtcaactcgctttgccctgtcatttttggtcatgaacttgttaaagcaggtttggcattagcactctttggaggaagccagaaatacgcagatgacaaaaacagaattccaattcggggagacccccacatccttgttgttggagatccaggcctaggaaaaagtcaaatgctacaggcagcgtgcaatgttgccccacgtggcgtgtatgtttgtggtaacaccacgaccacctctggtctgacggtaactctttcaaaagatagttcctctggagattttgctttggaagctggtgccctggtacctgcccggncgnccgctcgaagccgaattctgcagatatc

SEQ ID NO: 1763 - DNA, 423 bp, Homo sapiens
  misc_feature (1)...(423): n = A,T,C or G
cgtccgcaaacgtctccgtcagagggatggctctggggtcaccaagtcctcgtggagaatcaccgtgcgacagcttgagagcatgatccgactctcagaatcaatggcccgcatgcactgctgtgacgaggttcagcctaancatgtgaaggaagcttttcgattactgaataaatcaatcatccgtgtagagacgcctgatgtcaatctagatcaagaggaagagatccagatggagacggatgagggacaaggaggtgtcaatggtcatgccgacagccctgcccctgtgaataggttcaacggctccagtgaagatgccagccaggagactgtttccaagccctccttgagcttgggcttttgctgggatactgccgcatcttggaccttcatcgtgctccacctcaggaaaatnggaag

SEQ ID NO: 1764 - DNA, 352 bp, Homo sapiens
  misc_feature (1)...(352): n = A,T,C or G
cctccngatgacctcactatttacgggattgtaatgcaacggtggaagccctttcagcaagatgtgcgctgtgaagtggagatagtcctgaaagcaaattacatccaagtaaataatgagcagtcctcanggatcatcatggatgangaggtccaaaaggaattcnaagatttttgggaatactataatgagcnatccctttgcaggaaggaatgtaatattggctagcttgtgccctcaagtgtttggaatgtatctagtaaagcttgctgtggccatggtgctggctggtgggattcaaaggactgatgctacaggaacaccgggtcagagganaatctcatcttttatt

SEQ ID NO: 1765 - DNA, 347 bp, Homo sapiens
  misc_feature (1)...(347): n = A,T,C or G
ccgagcgatggcgggngcgggggtggggtgcggtggcggggtgcggtggcngaggtcccggtgaaatcaggggctaaggggacccaaagaaggcggnggatcataggggtggaaagaaagctgagaaccttgngaccggagtgtgaggggccaacggtgaagggcgctagaattttaaactaaantagggaccggaattcccctggggagatgaagntgcnagaacatagtgntcaggtgcctgtgggaaatattccctcttannatcacggtgctggtagaaggagagaacacaaggattgcccaacctgnagaccacgtcagcgtcactggtattttcttgccaa

SEQ ID NO: 1766 - DNA, 437 bp, Homo sapiens
  misc_feature (1)...(437): n = A,T,C or G
ccgcttgcataaacagccggccggcacttacagctgcttgaggaagctgccaaggaggtggcagatgaggtgacccggccccggccagctggagangngntgctccaagacatccaggtcatgctcaagtcagatgccagcccgtcgagcattcggattctgaagtcagacatgatgtcacacctggtgaagatccctggcatcatcatttcagcctctgcagtccgtgccaaggctactcgtatctccattcagtgccgcagctgccacaataccctnaccaatatcgccatgcgcccaggcctagagggctatgcccttcccaggaagctgcaatatggatcaggctgggcgcccaaagtgcccactggatccatacttcatcatgcctgacaagtgcaagtgtgtggacttncagactctgaaactgcaggagc

SEQ ID NO: 1767 - DNA, 189 bp, Homo sapiens
  misc_feature (1)...(189): n = A,T,C or G
aacatcaacatctgtctgnnggggganccnggngtggccaagtntcagctnctgtcatacatngatngantggcgccttgnangcagnacncaacaggcnggngctcctnaggagatggggnttacacgtagtctgtgcttgagagacttcgagagtgggnnaactgaccttagagggtggggccctgg

SEQ ID NO: 1768 - DNA, 678 bp, Homo sapiens
cgaaacacactggggctcctctgttaggagcgtaggagggacaggctggacaaaagggctcccgaacagcaggttcggaggagagcaacccggccctgacccccgcccccaacaccgttcccgacctcgctccccaatgtcccggctctgcaccaattcctcccgcaagccaaggaaccccgatttacttttagtctctaaaccgtttatttctccccaccagaaggttggggtgggcgggcctagaacacagcgtgcggcgggttcccgggtggagccagcgcagacagcgtgggtccctgcggctcttaggcgaaggtggagttgttccagcccacattggccgcgttcatgtcgtaatagttgatgtagaccctgcccgggcagaagcgcaggctctgcggccagcaggccaccagcacgcttgctgtacggagccggttctccgcgccgccgatctttgccgatgctgttcaggctgaagacgcggacggctcgcttgaacccccgaaagaattaagcttggtccgggaccacgtcgaccgcgaattacttggggggttcttgcttacgactaacacaatcactatgtcaaaaccaacaggaaaccctcccagaagggaggcccggtgaagtttgggtttaccattgaaatcggcatattgcaaaagggacagg

SEQ ID NO: 1769 - DNA, 524 bp, Homo sapiens
  misc_feature (1)...(524): n = A,T,C or G
gggagtcgacccacgcgtccgtcttgttacaactgagtccgggttggaggaggtgtggggccgctgccgccaggaaaaacagcactggaggcngtgtngntataaatcaaagaagagacagtgtgagaatgtcagccctcaactggaagccgtttgtgtacggggggctggcctccatcactgctgagtgcggtacatttccaattgatttaaccaagacacggctccagattcaaggccagacgaatgatgcaaaatttaaggaaattagataccgaggaatgttgcacgcattagtgaggataggcagagaagaagggctgaaagcactctactcggggattgcccccgcgatgttacgccaggcatcctatggcaccatcaagataggcacttaccagagcttgaagcgactattcattgaacgcccagaagatgaaactctaccgataaatgtgatatgtggaattctgtctggagtcatatcttcaaccattgctaatccaactgatgttttgaaaatt

SEQ ID NO: 1770 - DNA, 340 bp, Homo sapiens
  misc_feature (1)...(340): n = A,T,C or G
cccacgcgtccgggcggcaggnagggctgagccagcgacgccntnnattcantctncgcagcccgttctncggctgtcctccngtnccgatgnccagccctgccaccatgacggaacaggccatctntcttcgccaaagacttattggccggaggcatacnncngacgccatctccaantacggncgcggctccgntcgagcgggtcaagctgctgctncaggtncagcacgcnagcangcagatcagncgacgacaagcaatacaagggcatcgtggactgcattgnacncatccccaaggagcagggcgtnctgannttntgnaggggcaaccttgcc

SEQ ID NO: 1771 - DNA, 337 bp, Homo sapiens
  misc_feature (1)...(337): n = A,T,C or G
cttagggagtcgaccncgcgtccgcccacgcgtccggggatcgagacccggatgcggggcctgaaaagcacaaatgcagaacacacgggactgcggctgcaaatcctgagaaaggaagggctcaaggccttctacaacggcattgtcccccacctgggccgggtctgcctggatgtgaccacagtgtttatcctctgccatgaggtaggaaagctgctcaacagtgtggaagacggagtaagcccggaagggccttgaggggaccgccccaggcacctccagagcggccaccacccttgtctcacaggattccagtgcagaaatgccaagcggcccc

SEQ ID NO: 1772 - DNA, 416 bp, Homo sapiens
  misc_feature (1)...(416): n = A,T,C or G
anatgatgtgggactgcgggttgtaggnccggngggggttgacctgctcctgcaggaactnataggngatgaagtggatggactggaaggggatgttcatggtcagctgnntggngtanctncggcngaaggcccccaacccctgggtccttcacaccgnccnnatncanntgattgctgactcggtgntgcgagttgtacatatnccnncgctgttatcaccactttctgctggattcnttaccgcatagaggcacccactggctggccantactcccagctatccagtaancagtaatgggggtggtaataattccccagnatcctcctnaaagtctttnnaggctgggaaaaggctnttcttgcgnttgccgcgagttcctattgttcaggcccattaaaaaacttttctttg

SEQ ID NO: 1773 - DNA, 428 bp, Homo sapiens
  misc_feature (1)...(428): n = A,T,C or G
cacgcactttaaataatcaaaacccctatctttcccctgggaatggaggaatgccgaggaaggctgtgtttctgactcacacgggggagtcgggggagtcgtaaacaaccctgaagagaacagccaggcctggcgctctgggcttggtcctgggacacccgtttgacactgtaaaggtgaggctgcagacccagaccacctaccggggcatcgttgattgcatggtcaagattttaccgccatgagtccctcctgggcttcttcaagggaatgagcttccccattgccagcataagctgtggtcaactctgtcctgtttggggtctatagcaacaccctgctggtgctcacggccacctcccaccaggagcggngggcccagccgcccanctacatgcacatcttcctagcgggctgcaccggggggg

SEQ ID NO: 1774 - DNA, 585 bp, Homo sapiens
  misc_feature (1)...(585): n = A,T,C or G
ccacgcgtccgtggagcncctgttcccgcatgcccagacaatgccggtggaggaatttgtggctggctggatctctggcgctctgggcttggtcctgggacacccgtttgacactgtaaaggtgaggctgcagacccagaccaccctacccggggccatcgntntgattgcatggttcaaggattttacncgccaatgagntcncgnactaacatggtcntgggcntcactnttttggacccttcantgcaaanaggttcccggggccttancaannanancccaaggnanccanggaggctccatagngggncncncanntcccaagggngnnagggccctctctctcaacctccncncngnggtttnacccccnangggggngggtccnccccgntttgtcccaaccnttgngttgggcccaannnccnccctttctcccaattttcctttttnctccggngggggaaaaggggggaaagggggnggggggccnccccccnngngggggngggggggcccttnggttttttccccccnggaagggggggaagggtccccccttgggggggggccccccccttg

SEQ ID NO: 1775 - DNA, 590 bp, Homo sapiens
  misc_feature (1)...(590): n = A,T,C or G
cgtccggtcaaagccggttcccggcccagtcccgtcctgcagcagtctgcctcctctttcaacatgacagatgccgctgtgtccttcgccaaggacttcctggcaggtggagtggctcgcagccatctccaagaccggtcgggtagcgctccatcggaggcgggggtcaaaggctgcctggctggcaagggtgncagncnattgncccagnccaaggccagnaatccacctgncaagnattaaaaggccaaatanccaaaaaggggccattttaattaaggaacctggccggttggggttcccggtnaatttcccccaaaggggaagccaagggggangttttcntgttcccttttcctgggccgnccggnnnaaaaccctggggcccaaatgtcatcaggataccttccccaccccaagggcttctttaactttccggcctttcaaaaggattaaaaattanccaagggccaggnattcctttttcccctggggggnttgggggttggttggggaacccanatgnaagnnaaaacccccccaaggttttttttnggggccttcnttaaacctttttttggccaaggggg

SEQ ID NO: 1776 - DNA, 409 bp, Homo sapiens
  misc_feature (1)...(409): n = A,T,C or G
cgcgtccggccgctggtcgcagggctgcgggactcaatcttcgcatgaaatggaagagagggtggtgcggatagcttgaggaaggtcccgcatctggggctcgatctcgtgcagaggagcatttccgaagacactggccgctcccacaatggctccgaagaccccagcgaccagcgggttcatgagtttgttggggctgtccgctcggtaccagctgcgcagggatgtcaggacaaagaaacaagttgcctggttccagccctgcttcagcacggggcctgtggggccccggtaagtcccggtgttcccgcacaatctcctaaccctgtggaagaatcccctgtacttggatttggagaggtctggccatggattaacttnaccttgatggtctccatgggacatagga

SEQ ID NO: 1777 - DNA, 430 bp, Homo sapiens
  misc_feature (1)...(430): n = A,T,C or G
aggcgcctatgagagcctnttggcttttacctggtctgcgagaaatcaaactttgggcacaagtcatgaagccgacaagccngggagacacagtgtcagaattacaaggtcccgcatctggggctcgatctcgtgcagaggagcatttccgaagacactggccgctcccacantggctncgaagaccccagcgaccagcgggttcatgagtttgttggggctgtccgctcggtaccagctgcgcagggatgtcaggacaaagaaacaagttgcctggttccagccctgcttcagcacggggcctgtggggccccggtaagtcccggtgttnccgcacaatctnctaaccctgtggaagaatcccctgtacttggatttggagaggtctggccatggattaacttcaccttgatggtctccatgggacata

SEQ ID NO: 1778 - DNA, 500 bp, Homo sapiens
cgcgtccgcaccctggtggcaccaaagccctctcaggcaggcagacccagggcctccccgccacaccttgttcatggattttgtcgctggagccatcggaggcgtctgcggtgttgctgtgggctaccccctggacacggtgaaggtcaggatccagacggagccaaagtacacaggcatctggcactgcgtccgggatacgtatcaccgagagcgcgtgtggggcctctaccggggcctctcgctgcccgtgtgcacggtgtccctggtatcttccgtgtcttttggcacctaccgccactgcctggcgcacatctgccggctccggtacggcaaccctgacgccaagcccaccaaggccgacatcacgctctcgggatgcgcctccggcctcgtccgcgtgttcctgacgtcgcccactgaggtggccaaagtccgcttgcagacgcagacacaggcgcagaagcagcagcggctgctttcggcctcggggccgtggc

SEQ ID NO: 1779 - DNA, 424 bp, Homo sapiens
  misc_feature (1)...(424): n = A,T,C or G
cccacgcgtccgccaccctggtggcaccaaagccctctcaggcaggcagacccagggcctccccgccacaccttgnncatggattttgtcgctggagccatcggaggcgtctgcggtgttgctgtgggctaccccctggacacggtgaagggcctgctggccttgccctaggcctggagccgctcgtgcctgaagcccaattctcctgcaggtcaggatccagacggagccaaagtacacaggcatctggcactgcgtccgggatacgtatcaccgagagcgcgtgtggggcttctaccggggcctctcgctgcccgtgtgcacggtgtccctggtatcttccgtgtcttttggcacctaccgccactgcctggcgcacatctgccggctccggtacggcaaccctgacgccaagcccaccaag

SEQ ID NO: 1780 - DNA, 430 bp, Homo sapiens
  misc_feature (1)...(430): n = A,T,C or G
ccgctctagcggccgcccgggcaggtaccttaaagaccatgagaagaaaatgaaattggcatttaagagtttagacaaaaataatgatggaaaaattgaggcttcagaaattgtccagtctctccagacactgggtctgactatttctgaacaacaagcagagttgattcttcaaagcattgatgttgatgggacaatgacagtggactggaatgaatggagagactacttcttatttaatcctgttacagacattgaggaaattatccgtttctggaaacattctacaggaattgacataggggatagcttaactattccagatgaattcacggaagacgaaaaaaaatccggacantggtggangcagctttttggcaggaggcattgctggtgcttntttctcgaacaagcactgcccnttttggac

SEQ ID NO: 1781 - DNA, 344 bp, Homo sapiens
  misc_feature (1)...(344): n = A,T,C or G
nacctacangggcttnncannaancgnnnnaaancggagttacggcgtcatntttttnnnctttcncccccccaccccncctgnncnggggntntgnntngacaaanacttcccgnccncagncaaccacttcgtcanntccaagacggccgaggttncnataagagcgnnncaagctgntgnttgcaggaacagcncgccagcaaagcagatcgccnccgacaagcagacaagggcacattggantgcattgtacgcatcccaggaagcagggcgngctgtccttctggaggggcaaccttnncaacgaaattcgntacttcccnactcaagccctaacttcn

SEQ ID NO: 1782 - DNA, 407 bp, Homo sapiens
gtccgcggtggagccgctcgggcagcggagcaagaccaatgactgcccggagctgacagacagacagacagaagactgagcatggcagacgagccgaaacccatcagtccgtttaagaacctcctggctggcggcttcggcggcatgtgcctggtgtttgtggggcaccccctggacacggtcaaggtccgactgcagacacaaccaccaagtttgtctggacagccacctatgtactctgggaccttggactgtttccggaagactcttatgagagagggcatcacagggctgtatcggggcatggctgcgcccatcattggagtcacccctatgttcgccgtgtgcttctttgggtttggtctggggaagaaactacagcagaaatctccagaggatgaacttag

SEQ ID NO: 1783 - DNA, 503 bp, Homo sapiens
ccacgcgtccggtctcagtagcctccggctccgctgcttcccgagaaccccgcgccggaggctcggacccgaggtcgacgccgggcgcctctcctcctgcccgctatggctgcgcctcgcgggccccgcgctctgtcggccgccgcgccggggtccgggaagcccaaactgacgcaccccgggaaggcaatcctagcaggcggcctggctggaggcatcgaaatctgcatcaccttcccgaccgaatacgtgaagacgcagctgcagctagatgaacgagcgaacccaccgcggtaccggggcatcggagactgcgtgcggcaaactgtccgcagccattggcgtcctgggcctgtaccgcggcctcagctccttgctctacggctccatccccaaggcggctgtcaggtttgggggatgttcgagttcctcagcaaccacatgccgggatgcccaaggtaggctcgacagcaggagaggactatgtgcggtcttggggcccg

SEQ ID NO: 1784 - DNA, 482 bp, Homo sapiens
tcgaccccgcgtccggcttgaataactctaagacgactagacagtgaaaatgtcagccctcaactggaagccctttgtgtatggagggctggcctccatcacagcagaatgcggcacatttccaattgatttaactaagacacggcttcagattcaaggccagacaaatgatgccaacttccgagagatcaggtaccgaggcatgctgcacgcgctgatgaggataggccgagaagaaggcctgaaggcgctgtattcagggattgcacccgcaatgctgcgccaggcctcctatggaaccatcaagatcggcacgtaccagagcctgaagcggttaagctgtggaacgcccagaagatgaaaccctgctggtcaatgttgtgtgtggaattctgtctggagtcatatcctcagctattgctaatcccgactgattgtttttgaaaaatcccgaatgcaagcacaggaacagcgctgttcaa

SEQ ID NO: 1785 - DNA, 285 bp, Homo sapiens
  misc_feature (1)...(285): n = A,T,C or G
tctggagcaactatggcgnccagccgtggngccctngtcactgagggccanctggcctgctntgaccaggccaagcaactggtcctnancactgggtacctgagngacaacatattcacccactttgtctccagtttcattgccggcggatgtgccaccgtttctgtgccagcccctcgatgtgctgaagactcgcctgatgaactccaagggcgagtaccagggtgttttncactgtgccatggagacagnaaagcttggacccnaggccttttntcaagggtc

SEQ ID NO: 1786 - DNA, 275 bp, Homo sapiens
  misc_feature (1)...(275): n = A,T,C or G
gtccggncaaagccaggtnccggcccantccngncntgcagcagnntggctcctctntcaacatgacanatgccgctgtgtncttcgccaaggacttcctggcggggggagtggccggngccatctccaagacggcggtagcgcccatcgagcgnctaagctgctgctgcaagtgcaccatgccancaagaanatcactgcagataancaatacaaangcatnatagactgantggtccgtattcccaaggagcaangtatgttctgtccttctg

SEQ ID NO: 1787 - DNA, 356 bp, Homo sapiens
  misc_feature (1)...(356): n = A,T,C or G
tgcccgccgccgggttcaccaccaatgccaggcaggcatagtccagttccagctcgcgggccagtgcggcttccggcatgccggtcatgccgacgatntcgcagccgtcgcgttccagccgggcgatctcggccactgtctccaggcgcggcccctgggtgcangcatagacgccatgactgctataggcgcacccctcggccgccagcgccgcaatcagctgtgcccgcaggccttcgctgtagggatagctgaaatcgatatgggtcacctgctccagatcatcggcaaaataagtgtgctgggcnaccnctggtgtagtcgatcaantgatgcgggnacacagaaatgcccgg

SEQ ID NO: 1788 - DNA, 426 bp, Homo sapiens
  misc_feature (1)...(426): n = A,T,C or G
tcntntgtcgccgtgccagcggaaagggcaggatttcggcgtggccgtcggtgactccatggggaacgagttcacatacaaagattatgagaccactgccaagtggcttctgcaacacactgaatatcgacctcaagtggcagtgatctgtggttccggcttaggagggctgactgctcacttaaaggaggctcagatctttgactacaatgagatacccagctttccccaaagcacagtgcaaggtcacgcaggccgactggtgtttggattgctgaatggcanatgcttgtgtgatgatgcaaggcccggttccatatgtatgaaggatactcactgtcaaaggtgacattcccagtgagagttttccatcttcttggtgtggnaactttggtggtcaccaatgcttnntggagggactcaacc

SEQ ID NO: 1789 - DNA, 528 bp, Homo sapiens
  misc_feature (1)...(528): n = A,T,C or G
cgaccgcccgtctgacatgtataatcctatcaacacattaaagaccaatacgattgggacattaaacatgttggggctggcaaaacgagtcggtgcccgtctgctcctggcctccacatcggaggtgtatggagatcctgaagtccaccctcaaagtgaggattactggggccacgtgaatccaataggacctcgggcctgctacgatgaaggcaaacntgttgcaaagaccatgtnctatgcctacatgaagcaggaaggcgtggaantgcaagtggccanaatcttcatcctgcaggcgctccagggggagccactcacggtatacngatccggntcttcaaacaagggcgttccagtacntcagcgatctattgaatggcctccgtggctctcatgaacagcaacttcagcagcccggtcaaccttggggaacccagaaaaacacacaatcctanaattttcccagttaattaaaaaccttgtttggtancggaattgaattcagttctctccgaacccaggatg

SEQ ID NO: 1790 - DNA, 504 bp, Homo sapiens
  misc_feature (1)...(504): n = A,T,C or G
nnnnnnnnnnnnnnnnnnnnnnnnnnnggggagtttcaatattttattaaaatagcatatttaaccatggttaaccaagaatatgttaactttgtgccccccaacctgcccccgccccagatncgcagcaaaacacagtagtgatttcaaatatccttgatcatgaccaacaggaatatttcaaagtcaagtttgcaactcaaaagtagaccttggaaaaactntgaattaaaagagaaacataaagctctcacacngaattcttttatctgccctaaaatcaatgccggcgcacccaccacctggcaatactgntanggatttttctttangcatagggataaccgacctcatttnttnaggacccacttttataaaaaaaanccggcattttttggnccccgcttaaangntcctttttcagcttcacaaaggaaacccaggnanatnaaaacngntnacgacagnnacaaacatntgctctcacaagcaaggataaaaaaa

SEQ ID NO: 1791 - DNA, 2072 bp, Homo sapiens
cgcgcggcaggcgggcccccgcgcggcagggccctggacccgcgcggctcccggggatggtgagcaaggcgctgctgcgcctcgtgtctgccgtcaaccgcaggaggatgaagctgctgctgggcatcgccttgctggcctacgtcgcctctgtttggggcaacttcgttaatatgaggtctatccaggaaaatggtgaactaaaaattgaaagcaagattgaagagatggttgaaccactaagagagaaaatcagagatttagaaaaaagctttacccagaaatacccaccagtaaagtttttatcagaaaaggatcggaaaagaattttgataacaggaggcgcagggttcgtgggctcccatctaactgacaaactcatgatggacggccacgaggtgaccgtggtggacaatttcttcacgggcaggaagagaaacgtggagcactggatcggacatgagaacttcgagttgattaaccacgacgtggtggagcccctctacatcgaggttgaccagatataccatctggcatctccagcctcccctccaaactacatgtataatcctatcaagacattaaagaccaatacgattgggacattaaacatgttggggctggcaaaacgagtcggtgcccgtctgctcctggcctccacatcggaggtgtatggagatcctgaagtccaccctcaaagtgaggattactggggccacgtgaatccaataggacctcgggcctgctacgatgaaggcaaacgtgttgcagagaccatgtgctatgcctacatgaagcaggaaggcgtggaagtgcgagtggccagaatcttcaacacctttgggccacgcatgcacatgaacgatgggcgagtagtcagcaacttcatcctgcaggcgctccagggggagccactcacggtatacggatccgggtctcagacaagggcgttccagtacgtcagcgatctagtgaatggcctcgtggctctcatgaacagcaacgtcagcagcccggtcaacctggggaacccagaagaacacacaatcctagaatttgctcagttaattaaaaaccttgttggtagcggaagtgaaattcagtttctctccgaagcccaggatgacccacagaaaagaaaaccagacatcaaaaaagcaaagctgatgctggggtgggagcccgtggtcccgctggaggaaggtttaaacaaagcaattcactacttccgtaaagaactcgagtaccaggcaaataatcagtacatccccaaaccaaagcctgccagaataaagaaaggacggactcgccacagctgaactcctcacttttaggacacaagactaccattgtacacttgatgggatgtatttttggcttttttttgttgtcgtttaaagaaagactttaacaggtgtcatgaagaacaaactggaatttcattctgaagcttgctttaatgaaatggatgtgcctaaaagctcccctcaaaaaactgcagattttgccttgcactttttgaatctctctttttatgtaaaatagcgtagatgcatctctgcgtattttcaagtttttttatcttgctgtgagagcatatgttgtgactgtcgttgacagttttatttactggtttctttgtgaagctgaaaaggaacattaagcgggacaaaaaatgccgattttatttataaaagtgggtacttaataaatgagtcgttatactatgcataaagaaaaatcctagcagtattgtcaggtggtggtgcgccggcattgattttagggcagataaaagaattctgtgtgagagctttatgtttctcttttaattcagagtttttccaaggtctacttttgagttgcaaacttgactttgaaatattcctgttggtcatgatcaaggatatttgaaatcactactgtgttttgctgcgtatctggggcgggggcaggttggggggcacaaagttaacatattcttggttaaccatggttaaatatgctattttaataaaatattgaaactcaccaaaaaaaaaaaaaaaaaaaaaaaaaaaaaaaaaaaaaaa

SEQ ID NO: 1792 - DNA, 814 bp, Homo sapiens
  misc_feature (1)...(814): n = A,T,C or G
aanaaccccctattggcncacnntttngacgcncgcctgnaggtccacactagtggatccaaagattcggcacgagcttttctgtatgaatgttatggttgcataaagcattccatttaaaacaaaacaaaaagtaaagtagtttgtccaaacattatttaaccaaagactactatcagccgttctgattttctgtccaatgctcttcaactgctgaccccaaatatgggctctttgtcctagaaaggggaatatggaagccctgtctctcctttcgtcatctctttcacccagntgtacaagancagagcccggcattgagtattttgaagatggagccaatgtccctggtctgcccctgcctcggcatcccccaccacctctggcatccatacccgtggtgggtgctgtaacggcatctgggctttgtcatctcctttgcagaacatcgtactgtggganctgggttctgcnacggctccgctgtggagacaacaccaaancgggcgtcatccgcctgggantcatggaaatgattgcttttgccaagatcttctgcaaangccaagtgtctacagccaccttcctanaaanctgcggggtgggcgaactgatcaccacctgttacggaagggggaaacncagggtnggcnaaggcttccccanaantgggaaggtanccctcactggtctcccgcacccctccttcctcaattgaaaacccggcttngggtnaantgcacccantggaaattcatgccncatctatttgctnggaatgttccntttgccggctgcttttcccctgaaaccc

SEQ ID NO: 1793 - DNA, 602 bp, Homo sapiens
  misc_feature (1)...(602): n = A,T,C or G
gccacgcgtccgctcttcattnccccaggngggttgggggaattggagtttgttgggnntgccggacganaaatgnctaggctatttacaactgcncaanggccccaacgntgtntgccccnacgggntactacanccctttgctgncnccataaaantctttaccaannagcctntannancctgccacanctaccatcaccctttacattaccgccctnaccttagctctcacgatcgctcttctactatgaacccccctncccatacccaaccccctggtcaaccttcaacctaggnctcctatttattctagcccacctctagcctagccgtttacttcaatcctttgatcaaggntgngcatcaaactnaaaactacnccctgaacggcngcactgcgagncagtanccncaaaccaantcttnatatcgaagnncaccccttaggccatcatttcctacctantccaaccatatacttaaatnaagntgggcctccctttttaaaccttctcccaccccctttantcaacaaccacnantngaaacncccttnntntntttaccttccttgccnatnnaatggacccctttgggcc

SEQ ID NO: 1794 - DNA, 553 bp, Homo sapiens
  misc_feature (1)...(553): n = A,T,C or G
atngcaatggcattcctaatgcttacncgaacgaaaaattctaggntacnaacaactacgngggggcggccaacagttgtaggcccctacgggctactacaacccttcgctgacgccataaaactcttcaccaaagagcccctaaaacccgccacatnttaccatcaccctctacatcaccgccccgaccttagctctcaccatcgctcttctactatgaacccccctccccatacccaaccccctggtcaacctcaacctaaggcctnctatttattctaggccaccctctagcctagcncgtttttacctnaatcctcttggatcaggggtggagcatccaaacctcaaaaacctaccgccnctggatcggggcggcacctggcggaggncaggtagcccccaaaaacaaattctncaatattggaaaggtccaaccctcttaggcccattcaanttcttacntaattccaaaccaatttaacttaaaataaaggtggggctncctttttaaaacccttnntttccaaccccnttattccaccaaaccacc

SEQ ID NO: 1795 - DNA, 680 bp, Homo sapiens
  misc_feature (1)...(680): n = A,T,C or G
ccacgcgtccgcaatctcctactcctcattgtacccattctaatcgcaatggcattcctaatgcttaccgaacgaaaaattctaggctatatacaactacgcaaaggcgcggnaacgttgtaggcccctacgggctactacaacccttcgctgacgccataaaactcttcaccaaagagcccctaaaacccgccacatctaccatcaccctctacatcaccggccccggaccttagctctcaccatcgctcttctactatgaaacccccctccccatacccaaccccctgggtcaaacctcaacctagggcctcctatttattctaagccacctctagcnctagcccgttttactcaaatcccctggatcaagggggtggaagcattcaaaactcaaactaccgcccttggatccgggcgcacttgcggaagcaggttagccccaaaacaaatcttcatattgaaagtcaaccctaagccattcatttcttacttattcaaacattacctaaataaagtgggcttccctttaaaccctcttccacccctttatcacaaacacaaagnaaccaccctcttggattacctccctgccaatcatggacccctttgggcccataaatnatggattttatctcccacacttaagncaggaaggacccaaacccggaacccccctt

SEQ ID NO: 1796 - DNA, 423 bp, Homo sapiens
  misc_feature (1)...(423): n = A,T,C or G
cgcgtccgtcctactcctnattgtacccatnctaatcgcaatggcattcctaatgcttaccgaacgaaaaattctaggctatatacaactacgcaaaggccccaacgtnngtaggcccctacgggctactacaacccttcgctgacgccataaaactcttcaccaaagagccccnaaaaccangncacaagttaccatcaccccctnntacataanccgctcccnaacccttaagcttcttcacccattcgctctttgtacctaatngaaacncccccannccccatactccaaccccnntggncaacctcaacactaggcctactatttatttgntagccaccctnttagcctagncccggtattacctcaaattccttntgnatcaaggggtggaggcattnaaaaacttcaaaaacttac

SEQ ID NO: 1797 - DNA, 570 bp, Homo sapiens
  misc_feature (1)...(570): n = A,T,C or G
cccatttctaatcgccatagccttcctaacattagtagaacgcaaaatcttagggtacatacaactacgaaaaggccctaacattgttggtccatacggcattttacaaccatttgcagacgccataaaattatttataaaagaaccaatacgccctttaacaacctctatatccttatttattattgcacctaccctatcactcacactagcattaagtctatgagttcccctaccaataccacacccattaattaatttaaacctagggattttatttattttagcaacatctagcctatcagtttactccattctatgatcaggatgagcctcaaactccaaatactcactattcggagctttacgagccgtagcccaaacaatttcatatgaagtaaccattagctattatccttttatcagttctattaataaatggatctactctctacaaacacttattacaaccccagaacacatatgattacttctggcaagcctanccataggcataattgattntctcaacctagcagaaccaaacngggccccttgactgacagaaga

SEQ ID NO: 1798 - DNA, 2450 bp, Homo sapiens
  misc_feature (1)...(2450): n = A,T,C or G
nnnntttttttttttcttttagacatgaccaatttattcagagaattcaaatttcgtttggcaaagtatatccggggcagagagtttgggataattatgtcattggaagcaatcacattatctacagcaaattgcctggggtagtatctgaaggaaaggcaaaacttttaaaaacaatttagtatgtgggggggtgataatcataaatatttgcaaaggtaacaaaacaaacaaccagcttatacaaccaaggcacaaaatatgctaatgctaataatcctttattcaatttagctcaacacacattaagtacttaatttgtgcaagagactgggctatgtgctgggggtgaggtggaaatacaaaaacaccaagatgcaatccctctcaagaactgtataatctagtaagagcacatacagagatggtgcttgcaggtaaaaactgctctgaaaccatggggagagaagagtttacttccttccagagggtgaagtcgggacccatttaaatttggtagtatgggtgaggaaggtcataacacgctaagtaaactggtgtctaagcatgtgacggcaacagctaatggtctagttcctccatggctttaaatgcatgaaagggaaaagagtattcaaaggtatttttattttatctcattgttagcccagtataaggcaggatgacaaaaaataaataaaagtatgaagaggcaagaacatagattgaaaactccatttcctagttttagtgtaaactcaatcccttgtgcatatacatctagttcctgaagtccacactgccaaaagggaaaaacaagaaaaaccagccctagcagtgccctgtcatcatggcagagcactgtctcttctgtgggactgaaacagctagctttggctactgccggtagtggacaatatggcacatggaaattaaaaagtccataaacgtgccctcctaacacgagaataagaaaggtggctgaagtagataatttcagtgacggaggggatgaaatattttttggttaattgatgtaatgatgactcactatgccttatttcctatttttaaaaacacagaatgagcaagtcattcctgaacaaaaatttactgtgtgtataacatacacctcaaaatgaattttaagggaacatattactaatcaaataacacagtttatgctttttcaatttccacaaattgttaattatgatacttaagggaacccttacaatatataacaagtcatttcaatattattcatcatccttaacttctgaaagtttggtttatgttatcttatctagaaagaaaactacttacaaatctcattttcccacaaaattaattcaacatccaaccttaaaaataaataaagctttgccaatggtaaattggaatgcatatacttgccaggctttgatgaaataaaaataaacgatttacataagcagtacctggtaaaaccaaaacctccttttgaagtataaagttccattcttcttgccctctcagaactgccaatcaattagaatcctctcccccaggaactgttctggtttgtaatgtcatacacagtattttttaacattaataaattattgatatgctaccataaataaatagtcactttttaaaccaaaatgactgtagaggactaacagcacactgaaataatttatttaaaactaagatttgtaaaactgtgatctatcctggtctaatattattaaaattaaaaatcaaaagatgaaatattatttcagacctatatacatcaagatgccagttcttataaaaaacatactttagttgtaaatgctaggttatgcaaaaataattttatttcaatttaattttaatgaatctcccccaactataatattaaaaacatcaaaagaacttaagttttaatggcaaaaagttcctattttcccccatctactaaaaaggttgttttcccttattaacatacaatgccctattgttaaggcacaactttttttagattaaaaatgaaaccatagattaggtttattttatacaacagttacaagacagaccttttgtaggcatataaatacatcttaaattcaatcaagatctaaaatgaaaaattattttttctttctaggatcaatcaacacatagccaataggtagttacagctagaataattccaacagttcctgttttaacctgtcagattgtctccaaaaggccatcttcaaagtgcgatctaagagaggaaagcgtgaatattttcctttctgcatcggcactccacctttctttacttatgctcagctatcagagatgtggcgggttttaggggctctttggtgaagagttttatggcgncancnnagggttgtagtagcccgtaggggcctacaacgttggggcctttgcgtagttgtatatagcctagaatttcggacgcgggg

SEQ ID NO: 1799 - DNA, 353 bp, Homo sapiens
  misc_feature (1)...(353): n = A,T,C or G
cagcgttaagacgactgcctaactttggccacatgcgttctatattgagtccccccacgcatcagggcatgctggctaaaagatgggagccagcaacattctcttgggctccatcatttatatgagggttggcaatgccatctgtaccctctgtgaactcccactgctgttcactcagttaatctaagggacaccaaggggtctgcgggaggatgacctcacaagggactgaggacatgggagaccaccctcctgtgggtagaatacaccanagggcccaggcttgactctgtcctgtgttaaggaggcatcggtagttttgctgagcttgtcaggtgtttataatggacagt

SEQ ID NO: 1800 - DNA, 551 bp, Homo sapiens
  misc_feature (1)...(551): n = A,T,C or G
cacgcgtccgcttcctaggaagattgtaagtggtgaagggtgtttattataataatgtttgtgtattcggctatgaagaatagggcgaaggggcctgcggcgtattcgatgttgaagtctgctcctgcctcctgccgtggcagtgccatctctcctatgcagagccctaggcacccactgccctgtgggtcatctcttcaggccttcaggtttctgtcactcagttcccctggccctccctgacggccccaccgaggacaagagccacctccacccccagcaagatcgccctccttgcctgctttgcttttccccccagcacgaaccactgctggccacgctttgtgtttgcttgtttctgtttccttctattggaatctcagttccttgagaacagggcctggtttttcactgctgtacctcccgtgctttgaatggtttctggcacatagtgggtgcttagtaaatatgcnatgagtggagggactgccccacaggctgagtgaaagtcaagtgctgggccagagggcagcatatgcaccatggggacc

SEQ ID NO: 1801 - DNA, 564 bp, Homo sapiens
  misc_feature (1)...(564): n = A,T,C or G
gtcctaatggtgtagcccgctattaagggttcatttattcaatgattaaagtcctatgtgatctgatttcagaccagagtaatccaggttggtttctatctgtttaacatttctcctagtatgaaaggacaagagaaatacggcccacttcataaagngccctccccccataaatgatgctatctcaatctaggaaatcaccacacacccaagaacagggtttcttaagatggcggagcctggcaatagcataaaacgtaaaactttacaatcaaaggttcaactccccttcttaacaatatgcctataattaaccttttcctacttatattcccactctaattgctatagcattccttacacttaacagttacgcaaaggacctgataccgtaggcccctgtggactgcttcaaccatttgctgacccaataaaacttttcaccaaagaacccttacgaccctcaacgtctactgntaccctttatatcattgccttcaaccctggccctttntatcacccttctcttctggactccccttcctataccccatcccctaatta

SEQ ID NO: 1802 - DNA, 588 bp, Homo sapiens
  misc_feature (1)...(588): n = A,T,C or G
gcacgagacctcctactcctcattgtacccattctaatcgcaatggcattcctaatgcttacgngaacgaaaaattctaggctatatacaactacgcaaaggccccaacgttgtaggcccctacgggctaactacaacnccttcgntgacgccataanaacttcttcactcaaannagcccctaaaaaccccgccacaatnctacacattcacccttcttacattcaccngccaccgacctttagtcttctcacccaatccgcctcttttctaactaatgnaactccccccttcccccaataaccccaaacccctctggntcaaancncttnaacccntaagggcccttcccttatttttatttccttagnccacccttcttaggccctaaggcccggtttttnactttcaaaatccctttnttggatccagggggttggaggccaattcaaaaacttccaaaaaacttaacgncccccttggaattccgggctgncaaccttggtcgnaaggnccagggtaagggcccccaaaaaaccaaaatttccttccaaataatttggaaaagggtncnaccccncttaaggc

SEQ ID NO: 1803 - DNA, 469 bp, Homo sapiens
  misc_feature (1)...(469): n = A,T,C or G
tatagggagtcgcccacgcgtccggaaaaattctatgctatatacaactacgcaaaggccccaacgttgtaggcccctacgggctactacaacccttcgctgacgccataaaactcttcaccaaagtgctgggattacaggcgtgagccaccatgcccatccataaaanaatgatttttagtaagccgaacatcatcaaaatttaaaattttcactcttcaaatgacacttttaatagaatgaaacgacaaaccatgcactgggagaaaacattttgcaaatgacacattagataaaagacttgtgtatagagttaagaaatctctttactcaagaaaaagacaatttcagtttttaaaaagcacaaaagttgtgaaaagnacagttaagcattataaagaatgggccaaaataagccatttttaaaaaaggatgcttcaaccctcctttggtccatttanggaaaagg

SEQ ID NO: 1804 - DNA, 573 bp, Homo sapiens
  misc_feature (1)...(573): n = A,T,C or G
cctactcctcattgtacccattctaatcgcaatggcattcctaatgcttaccgaacgaaaaattctaggctatatacaactacgcaaaggccccaacgggtgtaggcccctacgggctactacaacccttcgntgacgccataaaactcttnaccnaaagagcccctaaaacccngccacatntgccatcaccctttacatcaccgccccgacctttagctctcaccatcgcntctttttactatgaaccccccttcccatacccaaccccctgngtcaacctcaacctagcgnctcctatttatttctagccacctctagcntanancngtttactnaaatcctctgnatcaaggngtgagcatnaaaacntttaaaactaccgcccctggantctggtcgccacctggngaagncaggttaggccccnaaacaaatactcattattgaaanggtcaaccccttaagccaatcantttcttaactcaatccaaaccattttacntaaaataaagttggncatnnccttttanacccttttnccnacccctttattcaccaancaacaaagga

SEQ ID NO: 1805 - DNA, 2363 bp, Homo sapiens
  misc_feature (1)...(2363): n = A,T,C or G
gcgtccgaatgaattnaagacttcagattgcacagccacaaaggtgccaaaaacagaaagaaagaaaagaaggaaaaaggaaactgatttggtggaagaacacaatggtcacatctttaaagccacccaatatagcatccctacatactgtgaatactgttcttctttgatatggataatggaccgagcctctgtttgcaaattatgcaagtatgcttgccataagaagtgctgtctgaaaaccacagccaagtgctctaaaaagtatgatccagagctgtcatctcgacaatttggggttgaactgtcccgtttgaccagtgaagaccgaactgttcctttagtagtggaaaagctcataaactacattgaaatgcatggactgtatacagaaggtatttatcgaaagtctggttcgactaataaaatcaaggagcttcggcagggtctagatacagatgctgagagtgtaaatctagatgactataacatacacgtcattgcaagtgtattcaaacaatggcttcgagatttgcccaatcctctcatgacctttgaactctatgaggaatttcttcgagcccaaggcctccgggagaggaaggagacaatccgtggtgtatactctgtgattgatcaactctcccgaactcatctcaatacactggaacgcctcatctttcatctagtcaggattgctctgcaggaagacactaatcgaatgtctgctaatgctttggccattgtgtttgcgccctgcattctccgctgccctgacaccactgacccactacaaagtgtacaggacatcagtaagactaccacttgtgtggaactgattgttgtggaacaaatgaataaatacaaggctcgtctcaaagatatcagtagcttggaatttgctgagaataaggcaaagaccatcctgtcactgattcgtagatcaatgggaaaggggcgtattcgtcgaggaaactatccaggtccatcgtctcctgttgtagttcggttgccttctgtgtctgatgtctcagaggagaccttgactagtgaggcagccatggagactgacatcacagaacagcagcaagcagctatgcagcaggaggagagagtactgactgagcagattgagaacctacagaaggagaaggaggagctaacatttgagatgcttgtactggaaccccgtgcctctgatgatgaaacccttgagtctgaggcctccattgggactgctgatagctcagagaatttgaatatggagtctgaatatgctatctctgagaaatcagaaagaagcttagcccttagctccctgaagacagctggcaagtctgaaccttccagcaagttgcgaaagcaacttaaaaagcagcaagactctttagatgtcgtggactcttcggtctcctctttatgtctgtctaacacggcatcatctcatgggaccagaaaactatttcagatttattccaaatctccattctaccgagctgcctcaggtaatgaggccctgggaatggaaggaccattgggccagaccaaattcctggaagacaagcctcagttcatcagcagaggaaccttcaacccggaaaagggcaaacaaaaattaaagaatgtgaaaaactcacctcagaaaaccaaagagaccccagaggggacagtcatgtctggccgcagaaaaactgtggacccagactgcacctccaaccaacagctagcactctttggaaataatgaatttatggtctgaaccggcagatgtgtgtccctccgtggctacagagtggtaaacaaatctcacctttggggctgcgtttcatcacctcgtccacaatagtcaatcctaattgtggtcctgcctcttttctaagcatatggctaagactgtatgtgctgaattcctgggcctcctgcagaagcagaaagcctgctggggatggtgccagctgtgccttggctgttgtatttgaattgagatttttactatacaaagccacctagggcctggggatttgggtcagttgtagttgcctctcccccaccctcttttcccttcccaaaggtgggtgttgaactaggggggatattgctgtcctgagggaccctctcatttctgacatttgaagaaaacgtataaatctttcttaaccgtgaaagcaaaagcctttgggtttattttgggatagttaggagctagggtagaatataatttttttccaaaaacttacttacaaacaaaaagcctaatccctctattttaagatttctgaaaaaacactccatgttatattctggggaaagcaaaaacaaaaaaaaaaaacaaaaaaaaaaaaaaagggcggccgccaccgcgg

SEQ ID NO: 1806 - DNA, 1282 bp, Homo sapiens
  misc_feature (1)...(1282): n = A,T,C or G
ccgaggagttcgtctcccgcctctccacccagaactacttccgctccctgccccgaggcaccagcaacatgacctatgggaccttcaacttcctcgggggccggctgatgatccctaatacaggaatcagcctcctcatccccccagatgccataccccgagggaagatctatgagatctacctcacgctgcacaagccggaagacgtgaggttgcccctagctggctgtcagaccctgctgagtcccatcgttagctgtggaccccctgggcgtcctgctcacccggccagtcatcctggggtatggaccactgtggggagcccagccctgacagctgggagcctgcgcctcaaaaagcagtcgtgcgagggcagctgggaggatgtgcttgcacctgggcgaggaggcgccctcccacctctactactgccagctggaggccagtgcctgctacgtcttcaccgagcagctgagccgctatgccctggtgggagaggccctcagcgtggctgccgccaagcgcctcaagctgcttctgtttgcgccggtggcctgcacctccctcgagtacaacatactggtctactgcctgcatgacactcacgatgcactcaacgtagtggtgcagctggagaagcagctggggggacagctgatccaggagccacgggtcctgcacttcaaggacagttaccacaacctgcgcctatccatccacgatgtgcccagctccctgtggaagagtaagctccttgtcagctaccaggagatccccttttatcacatctggaatggcacgcagcggtacttgcactgcaccttcaccctggagcgtgtcagccccagcactagtgacctggcctgcaagctgtgggtgtggcaggtggagggcgacgggcagagcttcagcatcaacttcaacatcaccaaggacacaaggtttgctgagctgctggctctggagagtgaagcgngggtcccagccctggtgggccccagtgccttcaagatccccttcctcattcggcagaagataattttccagcctggacccaccctgtaggcggggtgccgactggcggaactctggcccagaaactccacctggacagccatctcagcttctttgcctccaagcccagccccacagccatgatcctcaacctgtgggaggcgcggcacttccccaacggcaacctcagccagctggtgcagcagtggctggactgggcagcagacgctggctcttcacagtgtcggaggctgagtgctgaggccgg

SEQ ID NO: 1807 - DNA, 1605 bp, Homo sapiens
  misc_feature (1)...(1605): n = A,T,C or G
tcacgcgtccgccgcaactgccgtgacttcgacacagacatcactgactcatctgctgccctgactggtggtttccaccccgtcaactttaagacggcaaggcccagcaacccgcagctcctacacccctctgtgcctcctgacctgacagccagcgccggcatctaccgcggacccgtgtatgccctgcaggactccaccgacaaaatccccatgaccaactctcctctgctggaccccttacccagccttaaggtcaaggtccacacctccagcaccacgggctctgggccaggcctggcagatggggctgacctgctgggggtcttgccgcctggcacataccctagcgatttcacccgggacacccacttcctgcacctgcgcagccgccagcctcggttcccagcagctcttgggcctgccccgagacccagggagcagcgtcagcggcacctttggctgcctgggtgggaggctcancatccccggcacaggggtcagcttgctggtgcccaatggagccattccccagggcaagttctacgaagatgtattctactcatcaacaaggcagaaagtaccctcccgctttcagaagggacccanacagtattgagcccctcggtgacctgtggacccacaggcctcctgctgtgccgccccgtcatcctcaccatgccccactgtgccgaagtcagtgcccgtgactggatctttcagctcaagacccaggcccaccagggccactgggangaggtggtgaccctggatgaggagaccctgaacacaccctgctactgccagctggagcccagggcctgtcacatcctgctggaccagctgggcacctaccgtgttcacgggcgagtcctattcccgctcagcagtcaagcggctccagctggccgtcttcgcccccgccctctgcacctccctggagtacagcctccgggtctactgcctggaggacacgcctgtagcactgaaggaggtgctggagctggagcggactctgggcggatacttggtggaggagccgaaaccgctaatgttcaaggacagttaccacaacctgcgcctctccctccatgacctcccccatgcccattggaggagcaagctgctggccaaataccaggagatccccttctatcacatttggagtggcagccagaaggccctccactgcactttcaccctggagaggcacaggcttggcctccacagagctcacctgcaagatctgcgtgcggcaagtggaaggggagggccagatattccagctgcataccactctggcagagacacctgctggctccctggacactctctgctctgcccctggcagcactgtcaccacccagctgggaccttatgccttcaagatcccactgtccatccgccagaagatatgcaacagcctagatgcccccaactcacggggcaatgactggcggatgttagcacagaagctctctatggaccggtacctgaattactttgccaccaaagcgagccccacggntgtgatcctggacctctgggaagctctgcagcaggacgatggggacctcaacagcctgncgagtgccttggaggaga

SEQ ID NO: 1808 - DNA, 779 bp, Homo sapiens
tttattcatatttaattcaatttcattctcaaagaagccaagcaaattcaggtacatagggtacactaagaggtacaggtaaggcaagaattaactattgtttaatttctttatgtctttatctcatgtattttactgctatgttgtttcacatttctaaaaaaaccttaatcctctgctcttgtagtgtctgaattcaagaaataacatgggtttcccagtataaatgaaaagcaagactcttactcctaaactatataaaaagcagtaagtctgtctactgtcatacataaaatgaatgttgaagttcattacaccatccattagaaggaacattggaacaattccaaaaggaaacaaagataaacctccaaatcgcccaatagaacaggaactgagagatggtccacactgtgttccctcacacccaacatgctccccactactgagaactgtgactgctctcttcaaacacagagtgaagaatgggcctcatgtaacagagcagggaaagtggtggatgtggccctggaacgtgcactggcccaggccctcccacaacctgccccactggccctagctgcaactcctgctcaaactcctttctcctctcccaaagcctcttcatgcagggatgggtaggaaatgcgaactcttgcattgaccctgaccacatgctccaggactttcacatagctggtttcagcaagggcccttggaccccacaggaactcgtagcgcacaggatcactgccgggcgcctggcggtacctgcccgg

SEQ ID NO: 1809 - DNA, 1061 bp, Homo sapiens
  misc_feature (1)...(1061): n = A,T,C or G
tactctgtggagtttgtatggcagcgttacttagactacaggccagtaactgactgtaaaccagtggagtatgagtttttctggggcccaagatcccacctagaaaccaccaagatgaaaattctgaagttcatggcgaaaatatataacaaagatcctatggattggccagagaaatacaacgaagctctggaagaagatgctgccagagcctttgctgagggttggcaggctctccctcactttaggaggccctttttngaggaagctgttgcagagggtaccatcccctgattcagagggttccagctattcctcaaaaatatgccccacattcatggcctgagtcaagattggagagcaaggcaaggaagctggtgcagntatttctgcttatggattcaactaagctgcctataccaaagaagggaattctgtactacattggccgagagtgcagcaaagtgttccctgacctcctgaatcgggctgctcgcaccctaaaccacgtgtatgggacagagctagtggtccttgatcccaggaaccactcctacaccctgtacaaccgaagagaaatggaagatatggaagagattatggacagtccaaacaggcccggcaacaatttcttaatgcaggttctgagtttcatcttcataatgggcaaccatgctagggagtctgcagtctgggcctttctgaggggcttgggggttcaaaactgggagaaagcatgtgattacctgtaggtatttgagtcaagcgctacatagacagnttgcgggttcctgcagtgatccagtgcaatatgagtttggatggggtctaaaacccgtttggaaacctntaagatgaaagccttgcgatatgtggccagaatccacagaaaggaaccacaggactgggcacagcagtacanggaggcaatggnagaagaagnccataaaagctgatgttnggcacaggccaaattttttttacaacntnaggtaaaggaagcatggaatcaaangggccttcaagggngggcctttaacctantttnatgttttnggggg

SEQ ID NO: 1810 - DNA, 3033 bp, Homo sapiens
cccgcgtccgaaaaattcctgttcagcttgtttttaaaaataagataaagctatattggagtaaagtgaaagctgaaccatctgagaaagtctctcttaggatctctgtgacacagcctgactccatagttgggattgtagctgttgacaaaagtgtgaatctgatgaatgcctctaatgatattacaatggaaaatgtggtccatgagttggaactttataacacaggatattatttaggcatgttcatgaattcttttgcagtctttcaggaatgtggactctgggtattgacagatgcaaacctcacgaaggattatattgatggtgtttatgacaatgcagaatatgctgagaggtttatggaggaaaatgaaggacatattgtagatattcatgacttttctttgggtagcagtccacatgtccgaaagcattttccagagacttggatttggctagacaccaacatgggttacaggatttaccaagaatttgaagtaactgtacctgattctatcacttcttgggtggctactggttttgtgatctctgaggacctgggtcttggactaacaactactccagtggagctccaagccttccaaccatttttcatttttttgaatcttccctactctgttatcagaggtgaagaatttgctttggaaataactatattcaattatttgaaagatgccactgaggttaaggtaatcattgagaaaagtgacaaatttgatattctaatgacttcaaatgaaataaatgccacaggccaccagcagacccttctggttcccagtgaggatggggcaactgttctttttcccatcaggccaacacatctgggagaaattcctatcacagtcacagctctttcacccactgcttctgatgctatcacccagatgattttagtaaaggctgaaggaatagaaaaatcatattcacaatccatcttattagacttgactgacaataggctacagagtaccctgaaaactttgagtttctcatttcctcctaatacagtgactggcagtgaaagagttcagatcactgcaattggagatgttcttggtccttccatcaatggcttagcctcattgattcggatgccttatggctgtggtgaacagaacatgataaattttgctccaaatatttacattttggattatctgactaaaaagaaacaactgacagataatttgaaagaaaaagctctttcatttatgaggcaaggttaccagagagaacttctctatcagagggaagatggctctttcagtgcttttgggaattatgacccttctgggagcacttggttgtcagcttttgttttaagatgtttccttgaagccgatccttacatagatattgatcagaatgtgttacacagaacatacacttggcttaaaggacatcagaaatccaacggtgaattttgggatccaggaagagtgattcatagtgagcttcaaggtggcaataaaagtccagtaacacttacagcctatattgtaacttctctcctgggatatagaaagtatcagcctaacattgatgtgcaagagtctatccattttttggagtctgaattcagtagaggaatttcagacaattatactctagcccttataacttatgcattgtcatcagtggggagtcctaaagcgaaggaagctttgaatatgctgacttggagagcagaacaagaaggtggcatgcaattctgggtgtcatcagagtccaaactttctgactcctggcagccacgctccctggatattgaagttgcagcctatgcactgctctcacacttcttacaatttcagacttctgagggaatcccaattatgaggtggctaagcaggcaaagaaatagcttgggtggttttgcatctactcaggataccactgtggctttaaaggctctgtctgaatttgcagccctaatgaatacagaaaggacaaatatccaagtgaccgtgacggggcctagctcaccaagtcctgtaaagtttctgattgacacacacaaccgcttactccttcagacagcagagcttgctgtggtacagccaatggcagttaatatttccgcaaatggttttggatttgctatttgtcagctcaatgttgtatataatgtgaaggcttctgggtcttctagaagacgaagatctatccaaaatcaagaagcctttgatttagatgttgctgtaaaagaaaataaagatgatctcaatcatgtggatttgaatgtgtgtacaagcttttcgggcccgggtaggagtggcatggctcttatggaagttaacctattaagtggctttatggtgccttcagaagcaatttctctgagcgagacagtgaagaaagtggaatatgatcatggaaaactcaacctctatttagattctgtaaatgaaacccagttttgtgttaatattcctgctgtgagaaactttaaagtttcaaatacccaagatgcttcagtgtccatagtggattactatgagccaaggagacaggcggtgagaagttacaactctgaagtgaagctgtcctcctgtgacctttgcagtgatgtccagggctgccgtccttgtgaggatggagcttcaggctcccatcatcactcttcagtcatttttattttctgtttcaagcttctgtactttatggaactttggctgtgatttatttttaaaggactctgtgtaacactaacatttccagtagtcacatgtgattgttttgttttcgtagaagaatactgcttctattttgaaaaaagagttttttttctttctatggggttgcagggatggtgtacaacaggtcctagcatgtatagctgcatagatttcttcacctgatctttgtgtggaagatcagaatgaatgcagttgtgtgtctatattttcccctctcaaaatcttttagaatttttttggaggtgtttgttttctccagaataaaggtattactttagaaaaaaaaaaaaaaagggcgggccgctag

SEQ ID NO: 1811 - DNA, 541 bp, Homo sapiens
  misc_feature (1)...(541): n = A,T,C or G
tctctgctgtctctctccttaatgtcctctgtctgttctaagctgagatgttagatagaccttcagggatccctgacaaagaggcatctggtcttaacacccttcctctagtggccatgtgctcattactttcttcacttcattgagactgccccatgtgctagagaggtctcttccatgttgggaaatgcctctgccctcatctgggcagttctgatctgtgttcatgggttatttttcccattgtcagggtgaggcattcactcttccgncaagtnacngaagctcatcacanaccagtttgtnaagcanaagtacctggagtacaagagggtccctaacagcagaccacctgaatatgagttcttctggggcttgcgcttcctaccacgagactagcaagatgaaagtcctcaagttttgcatgcagggtgcagaagaaagaccccaaggacttgggctgtgcagtaaccccgaggcaatgggagatgggagtnccaagcttgcagtnttggctttggctnaaggcttaagcaggggc

SEQ ID NO: 1812 - DNA, 483 bp, Homo sapiens
tttttttttttttcattttgcaaatttaatgtaactctgataccaaaatatgacagcacacagaaagcaaacaataaagcaggaacagcaaacagatttttccatcacatgacaccctcagctgattggccataactgccttgactgctgtgtggacaaagattccaaggatgtactttggctccatgggaaggactactgcaatttattagcggtatctgtaaacatggggaataaatctgaaacctcactagccatacgagaagccacaggcaccaagactggcggctccactgccaaagccagcactggtgctcggtccaccaccaaagccagcaccagtgtttggtccaccgccgaagccagctcctgtgctcggtccaccgctgaagccactggtgcttggtccactgcagaagccaacaccagtgcttggtccaccgctgaagccaacaatagaactgggtccactactgaagcccg

SEQ ID NO: 1813 - DNA, 401 bp, Homo sapiens
ctatagggagtcgacccacgcgtccgctgaagaggaggtctgggagttcctgggtctgttggggatatatgatgggatcctgcattcaatctatggggatgctcggaagatcattactgaagatttggtgcaagataagtaccgtggtttaccggcaggtgtgcaacagtgatcctccatgctatgagttcctgtggggtccacgagcctatgctgaaaccaccaagatgagagtcctgcgtgttttggccgacagcagtaacaccagtcccggtttatacccacatctgtatgaagacgctttgatagatgaggtagagagagcattgagactgagagcttaaggcagggctggcactatttccttggccagggtaccttatggggccatatcctacaga

SEQ ID NO: 1814 - DNA, 738 bp, Homo sapiens
  misc_feature (1)...(738): n = A,T,C or G
ttttttttttttattttagtgttacaggtagaagtttattcatgaggggtttcaaagctatatatccccaggccagttctttattttgncaattccgtttttttttttttttttttaagatttgagtagtttaatgagttttcacttattggataaaagtgtcaacatagtgatggcaaaacaaacgcagctccagcccttgtttccaccttgttgcagctcaggggcgctgtccccagcagccatcggcgccagcatgaggaaggagtctcaggatgcccctccagcgagagccaggtcgggcctcactccttgaacttccattcctggcggcacatggggcagtgctgctgcacctgctgtgcgtgcagccacttgaggatgcaatgcatgtggaagcagtgggagcactggccccacaccagcgggcagtcgtcgccgggcaccttgcagtcagggcagcatccgttaaatgccatcctgcagatgccacagttctcatcgttggccacccagagccaagtggccacgccgttccagcacttaatcttcaccttcatggcagcagagcctcacgttgaggatatcttcaaagatctcaaatgggcctggccaacatgacgaaactccgtctccgcccctccgttggcaccgccggcgcccccgcggcaacgcgtaaaaaccaccagagtccccgcgggaaggcataaaaacgaccacagtcgcggcccgactacc

SEQ ID NO: 1815 - DNA, 423 bp, Homo sapiens
tttttttatttgtgaatatggcggtgagtttcctttaatcaaagacaaccatgacaaatttattaactatcaaaagctacattttactaaaaacaatctgcctttaaaaatgttgaatcatacaatatgtacaatacatgccgctttccgttttggacttcactatccatttgagtccttcagctagcatcaagcacttggcttctgctgcctctgacttggagtaatcacaggctctgaaatctcaaaggtcttcacaatctcctattactggcagtcggtcttggtcaagtcttattcttgcaaaaccatcccgtataatgaaggaaacatgaaagatgttttccactgtacgggggaaagaatgagatcaaccacaaagtcaaagaaggaccattgggtatcagatcaacacgaaaatat

SEQ ID NO: 1816 - DNA, 2167 bp, Homo sapiens
ggccggggccgcgacccgcatcgggatcgcacccgctcccgctcccgctcgcggtcccctttgtcgcccaggtcccgccgcggctctgcgcgggagcgcagagaggccccagagcgcccgagcctggaggacacagagccgtcggattccggggacgagatgatggacccggccagcttggaggcggaggccgaccaaggcctgtgccgccagatccgccatcagtaccgggcgctcatcaactccgtccaacaaaaccgtgaggacatactgaatgccggtgacaaattaacagaggtccttgaagaggctaacactctgtttaatgaagtgtcccgagcaagagaagcagtcctggatgcccactttcttgttttggcttcagatttgggcaaagagaaagcaaagcagctgcgctcagacctgagctcctttgacatgttaagatatgttgaaactctactcacacatatgggtgtaaatccgctagaagctgaagaactcatccgtgatgaagatagtcctgattttgaattcatagtctatgactcctggaagataacaggcagaacagcagaaaacacctttaataaaacccatacattccactttctgttgggttcaatatacggagagtgccctgtgccaaagccacgagttgatcgtccaagaaaagttcctgtgatacaagaggagagggcaatgcctgcccagttaagaagaatggaagaatctcatcaagaagcaacagagaaagaagtagaaagaatcttgggattgttgcagacatattttcgagaagatcctgataccccaatgtccttctttgactttgtggttgatcctcattctttcccccgtacagtggaaaacatctttcatgtttccttcattatacgggatggttttgcaagaataagacttgaccaagaccgactgccagtaatagagcctgttagtattaatgaagaaaatgagggatttgaacataacacacaagttagaaatcaaggaattatagctttgagttaccgtgactgggaggagattgtgaagacctttgagatttcagagcctgtgattactccaagtcagaggcagcagaagccaagtgcttgatgctagctgaaggactcaaatggatagtgaagtccaaaacggaaagcggcatgtattgtacatattgtatgattcaacatttttaaaggcagattgtttttagtaaaatgtagcttttgatagttaataaatttgtcatggttgtctttgattaaaggaaactcaccgccatattcacaaatctttcattcttacctgaataatttcacactctccattactcatgtcctcctaaggtctcctgtggagagtgaatatttccatcgcacttacttgctactttcaatgttctcaatgtcctattggactcactagggcttagctctgtggttgacacatagatatgcagattttcaaatgtctggaatgtgttactctactacatgttttttgaaatggaaacagatggaatgactggctactgtaataatactacagcagctccataatgcatgaaatcctaaaaagtatgtaatattataagtatcttttcaatacaggtttcattgctattattcatcagtttccgtttagattacctgttccgatttaataacctttgataaatttgaaaaatttgtctttcaaacagagcctgttagtattaatgaagaaaatgagggatttgaacataacacacaagttagaaatcaaggaattatagctttgagttaccgtgactgggaggtaaagctctgcctgttgcccctgcatagttctgactctgccttcacttgcagtaagcccagtgcctaaatgttcattattgtctgccaggagattgtgaagacctttgagatttcagagcctgtgattactccaagtcagaggcagcagaagccaagtgcttgatgctagctgaaggactcaaatggatagtgaagtccaaaacggaaagcggcatgtattgtacatattgtatgattcaacatttttaaaggcagattgtttttagtaaaatgtagcttttgatagttaataaatttgtcatggttgtctttgattaaaggaaactcaccgccatattcacaaataaaaaaaaaaaaaa

SEQ ID NO: 1817 - DNA, 400 bp, Homo sapiens
ggttccatcctcccacttgttaacagcgtgacgttatgtcagcacctgcgtcattggctgctgctaaactcttttggcctgagacagaaaaacctaaaataaccctcaagaatgccatgaaaatggaaagtggtgattcagggaatcttctagaagctgcaacacagggagcatcctcctccatctccctggtggccaacatcgctgtgaatctgattgccttcctggccctgctgtcttttatgaattcagccctgtcctggtttggaaacatgtttgactacccacagctgagttttgagctaatctgctcctacatcttcatgcccttttccttcatgatgggagtggaatggcaggacagctttatggttgccagactcataggttataagacctt

SEQ ID NO: 1818 - DNA, 347 bp, Homo sapiens
tcgagcggccgcccgggcaggtgtaatgtagccatttctgacccggcagccaggaaaatgtgaaacaatttgcttctggaaacaggacagccggggccgtgttcctgcaacagcagaccaagcaccgcggcggacccaggcaagcacggaacaagctgagacggatgataatatggatacaaaatctattctagaagaacttcttctcaaaagatcacagcaaaagaagaaaatgtcaccaaataattacaaagaacggctttttgttttgaccaaaacaaacctttcctactatgaatatgacaaaatgaaaaggggcagcagaaaaggatccattgaaattaaga

SEQ ID NO: 1819 - DNA, 347 bp, Homo sapiens; identical to SEQ ID NO: 1818

SEQ ID NO: 1820 - DNA, 809 bp, Homo sapiens
cacgcgtccggctgggcccgtgtttcggccgccgccatggccgcggtggacctggagaagctgcgggcgtcgggcgcgggcaaggccatcgcgtacctgaccagcggcggcgacgccaaggcatgaacgctgctgtccgggctgtgacgcgcatgggcatttatgtgggtgccaaagtcttcctcatctacgagggctatgagggcctcgtggagggaggtgagaacatcaagcaggccaactggctgagcgtctccaacatcatccagctgaccccagaaacaaaagacagcaacaacccgcacctgcaccacccccccccaatgcgacccaaagacaaagcccactcagggaccgacatgtccaacgtcaagaattcaggagacagccgcatgatccacgccaacaatgacatcaccaacactccccacatccaccagacgacctaccttcctgaaattgatttccccaaactgaagtgggaggaggaccgggacaccgtggtcgaagggctgaggcgcctgtcggactaccccgagtacatgtggtttctcctgtactgcgaggggacgcgcttcacggagaccaagcaccgcgttagcatggaggtggcggctgctaaggggcttcctgtcctcaagtaccacctgctgccgcggaccaagggcttcaccaccgcagtcaagtgcctccgggggacagtcgcagctgtctatgatgtaaccctgaacttcagaggaaacaagaacccgtccctgctggggatcctctacgggaagaagtacgaggcggacatgtgcgtgaggtga

SEQ ID NO: 1821 - DNA, 588 bp, Homo sapiens
  misc_feature (1)...(588): n = A,T,C or G
ccaggctttgtcttgaatggctccatttgtgaagatgaagataatgtgtgactcgagacgtttgccctgaacatgcaacctgccacaacactctcggaagctattattgtacgtgcaactcaggacttgaatctagtggaggagggccaatgttccagggcctggacgaatcctgtaagatgtnatgagtgctccaggaattcaactctctgtggtcccaccttcatttgcatcaacactctgggatcctacagctgctcatgcccagctggattctctttgccaacttttcagatccttggccatccggcagatgggaattgtacagatatcgatgagtgtgatgacacatgtcctttgaattcatcatgtaccaacactattgggagctacttctgcacttgccaccctggctttgcatctagcaatggacagctgaatttcaaagacctagaggtgacatgtgaagatattgatgaagtgcacccaagatccattacaatgtggactgaattctgtctgcaccaatgtaccaggctcctacatctgtggctgcctccctgactttcaaatggatccagaaggctc

SEQ ID NO: 1822 - DNA, 444 bp, Homo sapiens
  misc_feature (1)...(444): n = A,T,C or G
gcgtccgatcttcagagcccaggcttttcaagacagtgctgccttactcagcccaatccttaatgccactgatacaaaaggctgcaccttccgcttctattaccacatgtttggaaagcgcatttataggttggcaatctaccaacgaatctggagtgactcaaggggacagctgctgtggcagatatttgggaatcaaggcaacagatggattaggaaacacctcaacatttccagcaggcagccctttcagatattggtggaggcttcagtgggagatggcttcactggagatattgcgattgatgatctgtcatttatggactgcaccctctaccctggtaatttgccagcagaccttccaacttcaccagaaacgtcagttnctgtaacattaccttcacacaactgcacagaagtgagactctgtctgaaaaaaaaaaa

SEQ ID NO: 1823 - DNA, 175 bp, Homo sapiens
  misc_feature (1)...(175): n = A,T,C or G
ggcccaggaatggccgctgngtnaaatatggcaatgtanatgggcnagcaggtggacttgacnttatnattcantnangtgangccnanngtntacaggggtgtggtcccacgcnatgcncgaactggaccagcatgaanaccagctggtngcgggnacaggnccgaggtgctgt

SEQ ID NO: 1824 - DNA, 595 bp, Homo sapiens
gtccgggaataacttacctgtcaccttgtctagcaggatgcaaatcctcaagtggtattaaaaagcatacagtgttttataactgtagttgtgtggaagtaactggtctccagaacagaaattactcagcgcacttgggtgaatgcccaagagataatacttgtacaaggaaatttttcatctatgttgcaattcaagtcataaactctttgttctctgcaacaggaggtaccacatttatcttgttgactgtgaagattgttcaacctgaattgaaagcacttgcaatgggtttccagtcaatggttataagaacactaggaggaattctagctccaatatattttggggctctgattgataaaacatgtatgaagtggtccaccaacagctgtggagcacaaggagcttgtaggatatataattccgtattttttggaagggtctacttgggcttatctatagctttaagaattcccagcacttgttttatatattggtttcatttttgctatgaaaaaaaaaatttcaaggaaaagataccaaggcatcggaccaatgaaagaaaagtaatggatgaagcaaaccttaaaat

SEQ ID NO: 1825 - DNA, 63 bp, Homo sapiens
  misc_feature (1)...(63): n = A,T,C or G
tcttcgtcctggtggtcctggccagngnaccttctcctccgtcattgntggcctctccacctt

SEQ ID NO: 1826 - DNA, 484 bp, Homo sapiens
  misc_feature (1)...(484): n = A,T,C or G
cgcgtccgaaaggtattgagaacttggcttttgtcccctccagcccagacatcctgcgccgcttgtctgcgtcgccctcccaaatcgaagtctctgccttgtcctctgacccccaaagagagaattctcagccacaggagcttcagaagccccaggagccccagaagtcaccagagccatctctgccttcagcccctcccagtgtctccgaagagaagctccggtcactgtcgctgtccgagtttgaggaggggtcttacggctggaggaacttccatcctcaatgtctccagcgctgcaacacacctggaggctttctgcttcactactgcctcttggccgtcacgcaaggtattgtagttaatggcctagtaaatattagcatttccactgttgagaagcgttatgaaatgaaagagttccctgactggcctgatttcatcaagctacgatatttcattctggnttgggtggnctttatttg

SEQ ID NO: 1827 - DNA, 276 bp, Homo sapiens
  misc_feature (1)...(276): n = A,T,C or G
cgcgtccgctgggaggctgtggggtctgccacccagcagatctgtgtcacgggagtggcgctgtcactcgttgaggtggtggcctggttcctttggccttagggaaggacaaacttcaactctgagccttgattgagtgaccttggccaagttacctagcttttctgagcctcacttttttggcnattagatgaaccagaggtttatttcactcagaatcctgttcacgatgctggtatttggaccagcctgcgggtttatcctgggctctttctg

SEQ ID NO: 1828 - DNA, 616 bp, Homo sapiens
  misc_feature (1)...(616): n = A,T,C or G
gtccggagaaagcctgatgtcactgaggatgatccgcgatggttgggagcttggtggattgggtttcttctatcatggatctttgcttggtctttaataataccttttncttgctttccaaaacatttaccaggtacagcagaaattcaagctggaaaaacttcccaggctcatcagagtaatagtaatgcagatgtgaaatttggaaaaagtattaaagattttccagctgctctaaagaatttgatgaagaatgctgtctttatgtgtttagttctatcaacttcttcagaagccttaattactactggatttgctacatttttacctaaatttatagaaaatcaattcggattgacatccagcttcgcagctactcttggaggggctgttttaattcctggagctgctctcggtcaaattttaggtggcttccttgtttcaaaattcagaatgacatgtaaaaacacaatgaagtttgcactgttcacatctggagttgcacttacgctgagttttgtatttatgtatgccaaatgtgaaaatgagccatttgctggtgtatctgaatcatataatgggactggagaattgggaaacttgatagccccttgta

SEQ ID NO: 1829 - DNA, 25 bp, Homo sapiens
ccccctctacatgatggttctgcgt

SEQ ID NO: 1830 - DNA, 57 bp, Homo sapiens
  misc_feature (1)...(57): n = A,T,C or G
aaaaaaagggccgcccccgagaggtggcgtagctctgntaanangtggatncacccg

SEQ ID NO: 1831 - DNA, 65 bp, Homo sapiens
aagagctggcgatgagcccgctctggtagctgtgcaggtcatagcggcgctccagcggacgcgtg

SEQ ID NO: 1832 - DNA, 91 bp, Homo sapiens
  misc_feature (1)...(91): n = A,T,C or G
ncgcgtccgcaggaggctgcgcagggagatgtgggtnccttcgtgctgaagctagtggagggcctcanagggccagacctgggccccagac

SEQ ID NO: 1833 - DNA, 445 bp, Homo sapiens
  misc_feature (1)...(445): n = A,T,C or G
ccacgcgtccgctgacgttgaggtggctcaccagccctggcccgggccctgccctgctacctgactcaccactcagaccccggcccccttccttaccttgctgccattgctgtctctcctggcgccttccgtggctacctggccggcctcccctcccttggctnccccacctncacctggcctcactcccagccccgcccctcccaacctgcctgctcctgcccaccccatcccccgtccccatccnncatcnnccgtcccncgtaaccgatcaaccgtcccccaanncttgtnccccgatcnnanancncncanncagngccangatgcttactagtatgtttntggcanaggtntcattcatganntttggnatggngantngnaaatgcaaacattgaantgctggcccnttgctttgngatagggggnttcctcttaaaag

SEQ ID NO: 1834 - DNA, 233 bp, Homo sapiens
  misc_feature (1)...(233): n = A,T,C or G
ttagggatcgaccacgcgtncgaaaacatnnccgganagctgcncggacacgtacaccttcagcctctnggccaccttnctggtgcgggattccngattcngncnganatacctngtancgcccntgcatatngtgagtgccccccngtatcntgnacnacganaacctcngaanctncaggccctaacncctnaanttantanctccncntgtnnacnntgcctccccncag

SEQ ID NO: 1835 - DNA, 64 bp, Homo sapiens
  misc_feature (1)...(64): n = A,T,C or G
ccgcccacgcgtccgtacaaancttgggggagnncacagnanganctnggncagcgcacgcggn

SEQ ID NO: 1836 - DNA, 119 bp, Homo sapiens
  misc_feature (1)...(119): n = A,T,C or G
cgtccgccgcggcccggcccggccggctccctccctccctcccctgcagcccttcgcttgcccttccgccggccgcaccgggctccangaggccanaggctctgtggggtggggggagg

SEQ ID NO: 1837 - DNA, 67 bp, Homo sapiens
  misc_feature (1)...(67): n = A,T,C or G
ggcggggcacgtgaggactccgcgacgcgtncgagaaggatgataatgagactttgggccattacct

SEQ ID NO: 1838 - DNA, 818 bp, Homo sapiens
  misc_feature (1)...(818): n = A,T,C or G
tgtcgacccacgcgtccggaggaaagacttcaagtttcccaaatctagtggagggacagggcaagggaggaaagataggtacaggagtccacaggaggccaggttttggcacccntttgtnnggaattcagcttccttactagggatgaagaaaataagtgtggggctttgtgtctatgctaccagaaggaggagaggatgacacttcctctctgtttcccagattagagaacagtgaacccaatgctgcctgttggctagaaaacaagtgttaacttgcttctgagagacccttttctctgtccctgcagatatgccctgcgtccaagcccaatatagccctttccctccaggttccaagttatgcggcgcaagacatacaagctcgggaatacaccacnggagatcatgaaccncgacttacaccaagctgaccatggaccttggcagcacttgagatcacggctacaggcaccacgttccttgccaagcatnagtaccttnggngggnggntacttcgaggcaactaacgaactnaaggctttcntgcgtggaccaaatgccacgggcccttggttcnaaagtgggangaaggggcgggccccccancttcccattanccatttancaaccaacaancaacagcaancanccaaccanttaaccaaggagnaagcattaaagcaggccaattcaattcttccaagcctttcanaccccggnngggacnaggngcttggcccaacanccttccttgttcttttaagggagggtcccaccngngccaaacccaaccaaagccgggcttttcccccng

SEQ ID NO: 1839 - DNA, 551 bp, Homo sapiens
  misc_feature (1)...(551): n = A,T,C or G
tttaattcccgcctcccncngggngggaatntggncctccggncnataattttgcccgagcgnnncaagcaccnantgctgancacctttgngcttntgcgcanggggggnagatcanactctcttctccatngtcnagtgnnccagcactcttatcttcttcatgagaacttactgtatgccnccagntattacaactcacagcaccccttttacganagacctaactatgttcctaattaatacattcttgggcncaaaatatgtgacccttaatacactacttngtatgatctacnnagcngacttnnntttattaccnnnacttnacnactgtngnannttaaatttnngnccgctctgatanagncnnagctcttaattngggggggctnggcctttaacataaaggattcgaaactcnngcttttttttctaaatngtacaatatctgnnttccttntnactcaaatgcgtttgtggctcaaaacattttcaagtcnctgtgaaaatacctcctagccaaactntcttttttgngccttaaaccc

SEQ ID NO: 1840 - DNA, 474 bp, Homo sapiens
  misc_feature (1)...(474): n = A,T,C or G
ctatagggagtcgccccacgcgtccgcctgaggggctgtnagaaccactgccagcctgtcacagaggccttatctgcaacagcntcatcagtcactctgctcttcttcagtcactggtaaactnggtacatattnaaaangacngcatgtactgnccttggtgtctgtgtgcaaatgcnttaaaactgactaaacaaagctgaatcctcttccttcctntatgagttatagagattgcaggcntttcagtttgaagaaaaaaaaanatccaaagcattctcgcattccctgtactataagggtcagggtgatgacaagggggtgcacaagtcttcctggatngaaacccngatggtgagatggattctgngtganagtcctgagggtaaggaggggtgaaacaggagggcaaatgctcactgcctgcctnccgcactgcanacgtcccttttcccaccccangcactnaccttg

SEQ ID NO: 1841 - DNA, 492 bp, Homo sapiens
  misc_feature (1)...(492): n = A,T,C or G
gaaaccngggggagntgtncangaagaacgtttnaaancgcacgttngancngggaccaggcngagacggcggggngccagtaaagggcaggggccgcggnagccggccggagangcccngnanccaagcccaanangggacaccagcaccgagnccgggaccccgggaccaccaggcaagcgacccccngaccccngaggncatcaagcccaccatggacctggccagccccgaggcancccccgntgnccnnanngccctgcccagcttncagcaccnncanggacggctacatagggagaggggngacaccntcccctaccagcngccaggaaaaaggccagccaatggccnccncaganctnctncaaaggcccgncnacaanaaaagccncgnnntnaagacaanncaaacncngncangaggncncccnnaaaaggggcggagggaacntcncnanggggggacngggagggngaaccccccggnn

SEQ ID NO: 1842 - DNA, 99 bp, Homo sapiens
tcgaccacgcgtccgcctggtagaggtctcccgcgggcggggagggggaggctgtagcaactttaggcaacttcccaaaggtgtgccgcaggttggggg

SEQ ID NO: 1843 - DNA, 152 bp, Homo sapiens
  misc_feature (1)...(152): n = A,T,C or G
tttttcacnnaagttagagnttngnnagtngntccacgcgcccgcccacgcgttngattccgagtatgatcctaccanaccctgcngngaagcttnnatgatgggcttactgaccaacctggcagactggggagctggngtcacatgatcaa

SEQ ID NO: 1844 - DNA, 706 bp, Homo sapiens
  misc_feature (1)...(706): n = A,T,C or G
ttttattttcatcatatatttattacataaatatatagtaaaatagacgagcaacaattaccataaaaatatctttctttaaaatcctgacccaaaacacaacggggtgaaaaatcgcacataacagacatactgattgtcaacgtggggcaggagtaggagcccctcaagtcacccctgccggtcccacccctccctggggaagagacctacctccttccctgtttctggccacaacccccctccccccagcccagcaccagcttctcatacattcagtagcgcctctgggcagtgtccccctcccccccgcccaggagttcccagggcaggagttactgtcctccttatggacggtctctctctcacaacgccctgccctctcccagccctgcagacccgccaccaggagaaggggtaggggctcctcccccaccctccccaagtctgagcagggaggaggctggatgaggtatgtgtgttatgagtgatgggaggggcaatactgagatggagaggcgggtggtgggggcggggtagtggtcatggctctggcaaccccttgtcctggccatggcccccttcgtcctattcccagcaacccgtcctcccaccgatactgcacctgctgctccaccctgcctgccntagtgccccgggccaatactgggggaggcatgctgagcacccacatcaaggccatccc

SEQ ID NO: 1845 - DNA, 204 bp, Homo sapiens
  misc_feature (1)...(204): n = A,T,C or G
aagtttgcggcccgcaatggtaaangntttttntntnctttttccnccttttttttttcnccagctgtgaactnttggatttganacaggancagaacaaatcgaggggccanaggagggtgganagagcaagagtggtttaaataggggaggatgggancntggcggtgggggtggggnaagagttttttncaagaaggctca

SEQ ID NO: 1846 - DNA, 820 bp, Homo sapiens
  misc_feature (1)...(820): n = A,T,C or G
agcttgggcccctcgagggatcctctagagcggccgcccttttttttttttttttttttcaacggaaaacatttatttaaatttatttatttatttatttatttatttatggcatagcctttttttctctgtntggaattctggactacaacacacccaaaaggctatcttcccaagatctccccagccccagaaataattctgatcgccaatctttcccatgagtttgctagccattgatcaacttatgaccccttcaatccgttcagtgcctcacatagtccaatccaggtagcggcttctcatttctccctcctgtaataaactctttcccatgttctggctgaagtgttctgtctagagagcctactgtgcttataaatgccgtggtcacatttttctgaatgacaattcaaatagtcacctacactttccctgtgggatgtcaggtccagcatcaaacccgaatgagagtcttgctcaaaaggaagagtgttcctagcatctccccgaacaaacctttcattctgggncttttccattctagnctangacacacagatgtaaacctagagatgaaacctgaggagagctggagccgagttggccttgtcagtgtgaaaaancagactctgcttggaagagccatcaacgtaaaaggaggaagaangaggtctttaaattgcccgggttgnggggacaaggccaaggctccactttaatgncatgacgngtgaangatncaagggtttttcaggatnggcacccnccagccttacccnttgntgggactggcacacgaggcacattaacttgggtt

SEQ ID NO: 1847 - DNA, 151 bp, Homo sapiens
  misc_feature (1)...(151): n = A,T,C or G
gtacctgcacaccagcgctaagaagtatcatggaccgagactctctcatcgctgntttcatccgtgtcgtggaaaaggacaatgacgggcctcctgcactgggctccngtagaggaggctggagattccacccaaatcctcttctccaaga

SEQ ID NO: 1848 - DNA, 295 bp, Homo sapiens
  misc_feature (1)...(295): n = A,T,C or G
ccacgccccntttngacacgcgtccgggaggacgtggcggcggcggcggaactggcgggggtcccctcncggcgcccgggacccccggcctccangcatgggcgcccctgcggtgcntatcanctcatggccggctggtgcgctaccccggaaagcgggggtgganatgcnagcggancccnctgggccatncctccaccatggacaaaggccaggccctgcccctcccnagcancctggctccttctgctgggccctgaangcanacgggatnatgttgttggcccaggcctgt

SEQ ID NO: 1849 - DNA, 133 bp, Homo sapiens
  misc_feature (1)...(133): n = A,T,C or G
cagaccgcgcctggcttatanaaccaaggaangnccacangctnnangaaaaaattnatnnngnactncancatgtgattcanaagaatcacctgnatgatgagaccttggcaaagttaatagccaagatacc

SEQ ID NO: 1850 - DNA, 36 bp, Homo sapiens
  misc_feature (1)...(36): n = A,T,C or G
cccagtgtgcccaggtcatgagnctctccaccatcc

SEQ ID NO: 1851 - DNA, 141 bp, Homo sapiens
ccagcttcctggcctcattcctcggctgggagccactgaaggtcttgctggaagccctgtacttctcactggtggcaagcggctgcacccggatgaagatgacacccggcctctggccatcacgcggtctgaggagctctg

SEQ ID NO: 1852 - DNA, 86 bp, Homo sapiens
  misc_feature (1)...(86): n = A,T,C or G
catggnctgctgggggcctggncggagaggagctgggggccacgggagaagcaggcacgctacactgctctgagggaacnccgagc

SEQ ID NO: 1853 - DNA, 49 bp, Homo sapiens
  misc_feature (1)...(49): n = A,T,C or G
gaaaagcccanagaacaaaagtggcctgtggacatttaaggcctgggtg

SEQ ID NO: 1854 - DNA, 429 bp, Homo sapiens
  misc_feature (1)...(429): n = A,T,C or G
tccgccaactctgttctccaagtcgtctctcatctgctgatgttcatgttcggtcagtncttggactccatcttggtcgtactttgtgaatattgcctcaanctctgcatcagtatggcccttcctgaaattagagagaggatacagataaaaatcattccttgtacccagttcaccctcaacacaggagacntcaaanatgcangaggaaaggagaaattaccaaatgggggcaagttttcctcttataacatgttccagaaagatacctgnctctggaaaaaaaaaaaaaaagtatctgtatgagcccttgggctagaaatctcttatcaccaggaatttatcctttagaagcaggaatttttcagaacctnaggaagcatgattcttcaccctttgagaatctttgtccgaaagttcgtcaaaagg

SEQ ID NO: 1855 - DNA, 466 bp, Homo sapiens
  misc_feature (1)...(466): n = A,T,C or G
accccgcgttcgggacctggatttggatcacagttctttaccacgtcccatgagcagccgaagtttccctcgaagcctggatgactctgaggaggatgacggngaagatagcggacatagctccagaaggaggggaagcatttctagtggcgtttcttacgaagagtttcaagtcctggtgagacgagtggaccggatggagcattccatnggcagcatagtgtccaagattgacgccntgatcgngaagctagagattatggagcgagccaaactgaataggagggaggngctgngaaggctgatggatggggtggccgaggatnaaaggctgnntcgtgacagtgaaatccatanggaacagatcngaacggctagtacgtgaagagttcggaacgctgggaatccnatgatgcaacctnncnagaatcantcatgcgtttaggcacgccagttgggactaaat

SEQ ID NO: 1856 - DNA, 302 bp, Homo sapiens
  misc_feature (1)...(302): n = A,T,C or G
acccncccgcggtcctgagacccnacagtngngggcancaatcgnctcgctnnnggggagngtcgngganccccccgggaagncnncgcccgacaccgnnctacctnngngnacnngccggaccccactcctnccgctcggccagncaccccctggcgacgatcantgcctgcggatcgtcccaccgccngactagcgagggccatagggagcttagacagataggttgggccaaaaggattccnggaaggntgatngggcccacnggaaatggatcaaaacatgtgcgcctgccatggccc

SEQ ID NO: 1857 - DNA, 512 bp, Homo sapiens
  misc_feature (1)...(512): n = A,T,C or G
cgtccgggagtggttcctggagaggatcctactgaagaacatgaacactggagacctgaccatgttctactatggagactggctgtcccagcggaagggcaagaagaccctggtgtgtgaaatgtgtgccgttatcgatgaggaagaaatgatggagtggacctcctacaccgtcgcagtttaagaccagcgaccattcctgggagcaggcacttgatgccaacgtgttcatcatcatcttcggggagaacggggatagtgggacactggccctgaagcagtcggcaaactggaacaagtttgagcggaacaacacggacacattcaacttccctgacatgctgagcttgggccacctctgcaagctgagggtctggcacgacaacaaagggatatttcctggctggcatctgagctatgtcgatgtgaaggacaactcccgcgacgagaccttccacttccagtgtgactgctggctctcaagagtgagggtgacgggcagacngtccgcg

SEQ ID NO: 1858 - DNA, 252 bp, Homo sapiens
  misc_feature (1)...(252): n = A,T,C or G
ntngagcgccnccgggcaggtactgnaagatgcagcccatcaaccagactgaagctgcaccgaagtttatcttcntgagaacctgctgttaggggttccacgaataccgcactccgagtcagaatggatcctgcttttccccaggcttgagagatgaattaaagagtgctatgatgtctactctgtcagtagtgaagatagggctccctttggcccccgaaatggaaccgcttgnatctacacaagtgaaaa

SEQ ID NO: 1859 - DNA, 69 bp, Homo sapiens
  misc_feature (1)...(69): n = A,T,C or G
catcccctggccngctcagacgtgcgggcaccacagcgctcagagctgggagccgagtcaccatcgcgg

SEQ ID NO: 1860 - DNA, 20 bp, Homo sapiens
agggagtcgacccacgcgtc

SEQ ID NO: 1861 - DNA, 21 bp, Homo sapiens
agggagtcgacccacgcgtcc

SEQ ID NO: 1862 - DNA, 386 bp, Homo sapiens
  misc_feature (1)...(386): n = A,T,C or G
gatcgagaacccgangaatgcannaatccngnnccncaccgaggagggaaacgctgggngggggagaagcgncaaggaggaagacngcacattttcaatcatggaaaacantggggcnaccatgtntcaangangangaagaaatgaaagaggtcgatcttcctgagatagaagcagatnccgggngtcctcagccagttcctccanaaaatggatttatcccggaaatgnaaaagcanacttatactntggttggagaacnatgtntgaaaatttcatgcccttactgngctttgaaaacctgnntggcatacccagggacnttnangatgcttaccaagacggttaccctgggaanacaagggggggntgttgggaaatgccaa

SEQ ID NO: 1863 - DNA, 345 bp, Homo sapiens
  misc_feature (1)...(345): n = A,T,C or G
cgtccgatttttaaaacggcctccaaagccaagaatacagaggtttcttaacagttgaaaataattcataatgattgccatttgttgccattttattnnggcttatgggaacaaagtctaaaaggaaatcaggcaatgtgtcaggccccttgcacaggtaatttcttttaatccttagaagaaccctatcatatcccacaaaggaagttactgagctaaaaagtgaggaaaccaggttggcctcacttccaaacccaaattcagctgcaccatgatccatgggagngagtcttcctttgttncagatgcagtanacggacagtggggttgttggtcttcctggag

SEQ ID NO: 1864 - DNA, 438 bp, Homo sapiens
  misc_feature (1)...(438): n = A,T,C or G
cgcgttcgggccttttgaaaaagtccccagggcgccccatgcccaatcnttggccgctggagcccctggttcccgtggtcgnttntgcactgtcacctgtgccggtgggatccgttagcgcacccgggtctgcaacagccctgagcctcagtacggagggaaggctggtgggggatgtgcaggagcgtcagatgtgcaacaagaggagctgccccgtggatggctgtttatccaacccctgcttcccgggagcccagtgcagcaacttccccgatgggtcctggtcatgcggcttctgccctgtgggcttcttgggcaatggcacccactgtgagggacctggacgagtgtgccctggtccccgacatctgcttnttcaccaacaaggtgcctngctttggcaacactnancctggctttcaactggctggcctggcc

SEQ ID NO: 1865 - DNA, 44 bp, Homo sapiens
  misc_feature (1)...(44): n = A,T,C or G
ccacgtgtgtcccctctcncantgggtagggcacaggaatggca

SEQ ID NO: 1866 - DNA, 320 bp, Homo sapiens
  misc_feature (1)...(320): n = A,T,C or G
tatagggagtcgaccacgcgtccgctggactaacanaggagcaaagaccctatgtaccttatctgtacgtacctccaacaagctgcagtcngaccagaggaggggaggccagttcctctcccaaggggtgccacacacccctncctgttcatcaccagacaggcccttccttcttagccatatgtaaccttctcctccctgggaaatttcctctgcaggagccaaagcatatgggagctggagttgctggagctcctggtctgtatgcagagcangcatccaggaaaggagangagagtgtgacaatncaacacctcaaa

SEQ ID NO: 1867 - DNA, 734 bp, Homo sapiens
  misc_feature (1)...(734): n = A,T,C or G
actgtgaccccctgggccggcctgatgaccaacagaggaagtgcagcgagcagccctgccctgccaggtggtgggcaggtgagtggcagctgngctccagctcctgcnggcctgggggcctctcccgccgngccgtgctctgcatacgnnncgngntncatgnaagannatagcgnctgccnaacacattgnngngancnccnngtgggncctgantgggaaatcctncncntcnagncttacctgtgcctttatccnaagnggccngcctctnatncccaatnctgttctcattcnacattnaanntattaatnttnngnntnntcttgccccnaattatngtcctggactccanattctgagcctgggaaccatctgctgatgtctgtgcagttgcaccatttangttcaaganataccttgggncggtctctatgtcancctgggaagtnggcantttttgccnganntanattctggatnnnagntnataagaattttggcggcccttanagcnnntttatttctaantcctttaaaaagggctctttagccctgcttggttangacnagggtnatttngcaatttgancanacctcaanaanaaaattttantnttgggnattattggccccactttaaattacattggaatnnntngnncctttcangggnatnnttaaacntttttaagnaacttaaanccnaccaaagtgnattgcttncctgggg

SEQ ID NO: 1868 - DNA, 40 bp, Homo sapiens
agagcatagcgtcaaagtggctgcctggacgtggctgaag

SEQ ID NO: 1869 - DNA, 199 bp, Homo sapiens
  misc_feature (1)...(199): n = A,T,C or G
tttttccccaataattggnagggnaggnccgaggacaccacaaactctgcttaaagggcntggaggctctcaaggcatggccagacgcnntgncttgtacttcatcctgctgaatgctctgatcaacaagggccaagcctgcttctgtgatcactatgcatggactcaggngggaccagcgtgntcaaaaaacctttgc

SEQ ID NO: 1870 - DNA, 208 bp, Homo sapiens
  misc_feature (1)...(208): n = A,T,C or G
agaggtccgagcctatanccgnacgngacngtcacatacacggnncccatagtacaagcgaatggctgtncaaccgctcatanacgcccttnccgcctgggtagtcnatgttgaaccatgtgantacactcaccaatggcttattcatgggntgtcggcaggcttggcatgagatgctgagggaatcttcttcccaggctggactctt

SEQ ID NO: 1871 - DNA, 84 bp, Homo sapiens
  misc_feature (1)...(84): n = A,T,C or G
tccggtttcgctggatacgnacgtacgggacagtgggaatctcgttcatccattcatgcgcgtcactaattagatgactgaggc

SEQ ID NO: 1872 - DNA, 425 bp, Homo sapiens
agacagaaagtagattggtggttgccaagatctagggggagtgaggaattgaaatgacagctcacaggcacagggcttctttttgagctgatggaaatgttctggaattatataatggttgcggttggacacacaaccttatgaatatacgaagacttattgaactgtatagttggttaaaatgcttaattttgtgttatacaaatttttctcaataaaaattataggaagaaaaaaggtgctgattccacagagatgatattgcttataccttatctttattttattttatttcattttactttggtagtaaaaggcaatcgcaaatgtgagttgaactgccaggcaatgggctaccgcttctatgtacggcaagctgagaaagtcatcgatggcaccccctgtgaccagaacggcacggccat

SEQ ID NO: 1873 - DNA, 414 bp, Homo sapiens
  misc_feature (1)...(414): n = A,T,C or G
cncgggagagttggcaactggggcacgttgctcagtgtcctgcggcataggagtcatgcatagatctgtgcagtgtttaactaatgaagaccaacccagccacttatgccccactgatacgaagccagaagaaagaaaagcctgccgcaatgtttataactgtgagctaccccagaactgcaaggaggtaaaaaaactcaacagcgccagcgttgatggggagtatttcctggctgtcagagggaagccgctaaaggtattctgtgcagggatgaattctgactatcccaaggagtatgtgacactggctcacggtgactcagagaactttnccgaagtttatggtcacagattgcacaacccaacagaatgtcccctataatgggagcccgccgagatgactgncattgcccg

SEQ ID NO: 1874 - DNA, 389 bp, Homo sapiens
  misc_feature (1)...(389): n = A,T,C or G
gtcgaccccgcgtccgggacattttgccagtaatgttgtttgactatgtttaagacccctaagtttaggaaaacataaaaaatggttgcagaaggtgatcagcaagagccctgggtcagtgcaagcaataaaaaagactaactgctcaccactgtcatggaagctacaggatttaagtgtcatgagcttggtggatttaatagtttgccctgtcagtctttaaatttaaagggcttagttaaaggtgtccaaagacaggaggtggtctgtaaaaggttggatgacaactccattgtccagaacaattactgtgatcctgacagtnangccacctgaaaatcaaagagcctgcaacactgagccctgcccacctggagtggttcattggg

SEQ ID NO: 1875 - DNA, 529 bp, Homo sapiens
cgcgtccgatttttaccattggttaaaattatgtcttaatagtaatctttaaaaactgtcttagtgttaggttggtgcgaaagtaattgcagcttttgccattacttttgcgccaacctataaaattgcagataattgattcaaagaaaatttgtggaaggattttttaatacgaaatagtagatacagggtttaggtgaacttggaattggtagaaataagagtacaaatatgacagaagataaggtttttcacattttatgcaaagttgaattttaaattattaaaatgtgaattttaaaatgttaagtacttgtcaaaaaataaaaggattccaagttgtccatctaaatgaatcctaaatcgtgtttacactgtcaccacaaggtggtgccacttcagctggaaagcaaaaatggagtcctggtggtggtgtgggagaaaggtggggatggagattcctgcaccctttctcttcaccagcatatctttaacgatatgactttttacaattagagtaggggaagga

SEQ ID NO: 1876 - DNA, 123 bp, Homo sapiens
  misc_feature (1)...(123): n = A,T,C or G
aaagcacaacagagnatnggccanntncacaacttgaaganggtccanaagnnccncngggcgctnngacacccncatnggaaatannagggcggcgacacccctcgagnggcatcgattact

SEQ ID NO: 1877 - DNA, 60 bp, Homo sapiens
  misc_feature (1)...(60): n = A,T,C or G
cgtccgcttacatcaaaactcctatactgacctganacagaggcaagcagtgatacccac

SEQ ID NO: 1878 - DNA, 189 bp, Homo sapiens
  misc_feature (1)...(189): n = A,T,C or G
nggatgctgctttcctgcctcatgctgctgtctcaggttcaaggtgaanaaccccacagggaactgccctctgcncngatncgctgtcccnnaggctccaaggcctntggctcccactgctatgccccgttnttgtcaccnnnatcctggacagatgcagatctggtctgccanaancggccctctgga

SEQ ID NO: 1879 - DNA, 282 bp, Homo sapiens
  misc_feature (1)...(282): n = A,T,C or G
acaacagacattgngtcnntgcctcnnaagaatgagattcatngcanctcntcanggtncacancatctcntacntcatgctgatctcctgcctgatgtgnctgtntcagacccntggncaatatgcccatanaganttgccccatgcccggatcngnatgtccagaangcaccaatgnctatcgctcctactgctagttactntaatgaaaaccgtgagacctgggttgatgcagatctctattgactanaaanatataattcgggctacctggtgtctgt

SEQ ID NO: 1880 - DNA, 189 bp, Homo sapiens
  misc_feature (1)...(189): n = A,T,C or G
ctccncccngatgtnccngtctctgagccaaggacaggattccnanacccagnngactgantcccccanncaactgnccaganagcgccnntgccnntcgctccgngggctactgacnntactgaaaaccctgagacctgtgttgatgcacatctctatngccanancatcaattcangaaacctgatg

SEQ ID NO: 1881 - DNA, 132 bp, Homo sapiens
  misc_feature (1)...(132): n = A,T,C or G
gtttnaggagtcgntccncgcgtacgaaccancncagagtnccgatctgcntcntgngcnntagnttcattgnncctcancatggctcanannagctcanncttcatgctgatctccggnctgatgttnctg

SEQ ID NO: 1882 - DNA, 20 bp, Homo sapiens
  misc_feature (1)...(20): n = A,T,C or G
atctccngcctgatgtttct

SEQ ID NO: 1883 - DNA, 613 bp, Homo sapiens
  misc_feature (1)...(613): n = A,T,C or G
aaaacccatctccaattgtgtatggattcaagtgtcagtcatttatgaccaactgtgtagtgtgccctcatatagtatttgtgagaagaagttttcaatgtaaggggaagggtggagaaggagagagaaatatgtgaggtagtaaggaggacagaaaacagaacagaaaagagtaacagctgaggtcaagataaatgcagaaaatgtttagagagcttggccaactgtaatcttaaccaagaaattgaagggagaggctgtgatttctgtatttgtcgacctacaggtaggctagtattatttttctagttagtagatccctagacatggaatcagggcagccaagcttgagtttttattttttatttatttatttttttgagatagggtctcactttgttacccangctggagttgcagtggcacaatctcgactcactgcagctatctctcgcctcagcccctcaagtagctgggactacaggtgcatgccaccatgccaggctaatttttggtgttttttgtagagactgggttttgccatgttgaccaagctggtctctaactnctgggcttaaagtgatctgcccgcccttggccttccaaagtgctg

SEQ ID NO: 1884 - DNA, 126 bp, Homo sapiens
  misc_feature (1)...(126): n = A,T,C or G
cctgataattcattttggataggcctttctcggccccanactgangtaccatggctctnggagganggatcnacattctcttctaacttatttcagatcagaaccacagctacccaagaaaaccca

SEQ ID NO: 1885 - DNA, 1700 bp, Homo sapiens
  misc_feature (1)...(1700): n = A,T,C or G
tgcccctnatggcctcctggagagcattgcgntggccaaagccttcgcatctcagaataattaccgcatcgatgccaaccaggagctgctggccatcggtctcaccaacatgttgggctccctcgtctcctcctacccggtcacaggcagctttggacggacagccgtgaacgctcagtcgggggtgtgcaccccggcggggggcctggtgacgggagtgctggtgctgctgtctctggactacctgacctcactgttctactacatccccaagtctgccctggctgccgtcatcatcatggccgtggccccgctgttcgacaccaagatcttcaggacgctctggcgtgttaagaggctggacctgctgcccctgtgcgtgaccttcctgctgtgcttctgggaggtgcagtacggcatcctggccggggccctggtgtctctgctcatgctcctgcactctgcagccaggcctgagaccaaggtgtcagaggggccggttctggtcctgcagccggccagcggcctgtccttccctgccatggaggctctgcgggaggagatcctaagccgggccctggaagtgtccccgccacgctgcctggtcctggagtgcacccatgtctgcagcatcgactacactgtggtgctgggactcggcgagctcctccaggacttccagaagcagggcgtcgccctggcctttgtgggcctgcaggtccccgttctccgtgtcctgctgtccgctgacctgaaggggttccagtacttctctaccctggaagaagcagagaagcacctgaggcangagccagggacccagccctacaacatcagagaagactccattctggaccaaaaggttgccctgctcaaggcataatggggccacccgtgggcatccacagtttgcagggtgttccggaaggttcttgtcactgtgattggatgctggatgccgcctgatagacatgctggcctggctgagaaacccctgagcaggtaacccagggaagagaaggaagccaggcctggaggtccacggcagtgggagtggggctcactggcttcctgtgggatgactggaaaatgacctcgctgctgttccctggcatgaccctctttggaagagtggtttggagagagccttctagaatgacagactgtgcgaggaagcaaggggcaggggtttccagcccgggctgtgcgaggcatcctggggctggcagcaccttcccggctcaccagtgccacctgcgggggagggacggggcaggcaggagtctgggaggcgggtccgctcctcttgtctgcggcatctgtgctctccgagagaaaaccaaggtgtgtcaaatgacgtcaagtctctatttaaaaataattttgtgttttctaaatggaaaaagtgatagctttggtgattttgtaaaagtcataaatgcttattgtaaaaaatacaggaaaccacccctcaccctgtccacttgggtgatcattccagacccctccccaaacatgcatatgtacctgtccgtcagtgtgtggatgtatgtttacagttctacataaatgggatcattttatacatggtgctctggaacccacatttttcatgcagtcatttgcagtgaattatttattgtgataataaatagcattagaatacaagaaaaaaaaaaaaaaaaaaaaaaaaaaaaaaa

SEQ ID NO: 1886 - DNA, 585 bp, Homo sapiens
  misc_feature (1)...(585): n = A,T,C or G
cgccccgcgcccggcgcaatgacaactggggctgcccccatgtggtgacttcacaagtcaaatatctcttgggaatgaaaatgccatatatatccggaccacttggattcttttatatttatgcatatgtttttgaaaacatcaagtctgtgcgactggaagcattgcttttatccttgctgagcattgtggtccttgttcttgttaaagagctgaatgaacagtttaaaaggaaaattaaagttgttcttcctgtagatttagttttgattattgctgcatcatttgcttgttattgcaccaatatggaaaacacatatggattagaagtagttggtcatattccacaagggtaatgtagtcctttttaaaaacatattatttgtttgtttgtttatttttgatggagaaagggacagggagtgagtgggtatggatatttcatttcttaattctaattaattttctattacaaaatgatagaaatacacacttcatgtgtagagaaagagtaacttcctagacttcaccttcttactaaggatgttnatnattgctttatgcagcattgcttcaggtaaaaag

SEQ ID NO: 1887 - DNA, 562 bp, Homo sapiens
cgcgtccggcggacccagctgtggcgacgccaggagaccccaagctgcatcgccgagtggaagcaactagaactccagggctgtgaaagccacaggtgggggctgagcgaggcgtggcctcaggagcggaggacccccccactctccctcgagcgccgcagtccaccgtagcgggtggagcccgccttggtgcgcagttggaaaacctcggagccccgctggatctcctggctgccacccgcaccccccgccagcctacgccccaccgtagagatgccttcttcggtgacggcgctgggtcaggccaggtcctctggccccgggatggccccgagcgcctgctgctgctcccctgcggccctgcagaggaggctgcccatcctggcgtggctgcccagctactccctgcagtggctgaagatggatttcgtcgccggcctctcagttggcctcactgccattccccaggcgctggcctatgctgaagtggctggactcccgccccagtatggcctctactctgccttcatgggctgcttcgtgtatttcttcctgggcacct

SEQ ID NO: 1888 - DNA, 230 bp, Homo sapiens
  misc_feature (1)...(230): n = A,T,C or G
cccgcgtccgcagccttcccggttcgggaaaggggaagaatgcaggaggggtatngatttctttcctgataggatcggttgggaaagaccgcancctgtgtgtgtctttcccttctaccaangtgtctgttgctccgnaaataaaacgtcccactgccttctgagagcgctntanaggcagcggaagggtagtccgcggggcattccgggcggggcgcgagcagagacag

SEQ ID NO: 1889 - DNA, 496 bp, Homo sapiens
  misc_feature (1)...(496): n = A,T,C or G
ccccttaacactgaacccattacttttccaagaccagaaaaaaatattacatgaacaggaactacttctccttcagataagaattcaagctttgacattgtaaaccacagacgaattggagcttggcattgaaaggaggtgttctgcaatgattttttttcttgtttagagaagtttacttctacaagaaagaaaatctgaaaaatgacaggagcaaagaggaaaaaagaaaagcatgctttggagcaaggatgcataccccccagtgtgaaagacattatacagtggtgtagaaggcgactgcccattttggattgggcaccacattacaatctgaaagaaaacttgcttccagacactgtgtctgggataatgttggcagttcaacaggtgacccaaggattggcctttgctgntctctcatctgtgccccagtgtttgggtttatatgggtctctggttcctgccataatttatgcccatattttggaatggg

SEQ ID NO: 1890 - DNA, 482 bp, Homo sapiens
  misc_feature (1)...(482): n = A,T,C or G
gcaccgaggctgctgtcttggcatgagggaacgggganggctgtagtggggccaccccagagccagcgatcagatccggccaaggatgtctgcagaaacgcctaacatagagactctccctctccaagccgcagctctcgccagacccgagaaggctcagggaagctctcaccgaggctcggttccatcagctcttcaggggcgaagagcaggaaccggagctacctgaagagcgcggctttccccggctcttcgggctgtggaggctgcgggctcgcgcttgttccgggacaggggcgtggcgcctgctgctggctcggctgcccgcgctgcactggctgccccattaccgctggcgggcctggctgctcggagatgcggtggccggagtgaccgtgggcatcgtgcacgtgccccagggcatggcttttgctctcctggcctccgtgcccccggtgtttggactctacacttctttcttc

SEQ ID NO: 1891 - DNA, 360 bp, Homo sapiens
caccacgcgtccggctgcccgaagtgcgacacgagtgtggccaccacgatgaccagcagctccgtgggcagcggcaccctcaggcggtgtcggtagcggtctgagagctccttcgcggctagcagcaccgccaggcacaccgtgctggtgaccacgtcgcacacgttggcctgcccggcgccgcgcagcaggctcagccatgtgaggaccaccatgccgggcccctggtgccgcgggatccgcacgcccagcaggtgtttgagctgcgaggtcaggatggtcacggaggcccccatggcaaagccatcgagcagtggctgtgagaggtaggcggacacgaagcccacccggaggacgccc

SEQ ID NO: 1892 - DNA, 465 bp, Homo sapiens
  misc_feature (1)...(465): n = A,T,C or G
ncgtccgcggacgcgtgggcggacgcgtgggcgaggggtccgccccaaggggcccgttgctgccggggaccttgtcgtttggccctggatccgggggctcctgtgaccatgccctcttctcggccgcaggtcggccacgggacctgacgcaacaggatggacgagtcccctgagccttgagcagggcagagggccggtgccggtccgacggcagcgcccagcaccccggggtctgcgtgagatgctgaaggccaggctgtggtgcagctgctcgtgcagtgtgctgtgcgtccgggcgctggtgcaggacctgctccccgccacgcgctggctgcgtcagtaccgcccgcgggagtacctggcaggcgacgtcatggtctgggctggtcatcggcatcatcctggtgcccgcaggccatcgcctactcattgcttgggcccccccggggggggggggcccccctt

SEQ ID NO: 1893 - DNA, 561 bp, Homo sapiens
  misc_feature (1)...(561): n = A,T,C or G
gccgagcgtggcggctgcgtcggggtcggttctgcagcgctgtatcgtgtcgccggcagggaggcatagcgcctctctgatcttcctgcatggctcaggtgattctggacanggattaagaatgtggatcaagcaggttttaaatcaagatttaacattccaacacataaaaattatttatccaacagctcctcccaggaggattctctatgggaggatgcatggcaatgcatttagcatatagaaatcatcaagatgtggcaggagtatttgctctttctagttttctgaataaagcatctgctgtttaccaggctcttcagaagagtaatggtgtacttcctgaattatttcagtgtcatggtactgcagatgagttagttcttcattcttgggcagaagagacaaactcaatgttaaaatctctaggagtgaccaccgaaagtttcatagttttccaaaatgtttacccatggagctaaagcaaaacctggggttaggacataattggaaagttatgggatttctttaccaaaagctgnccagggagaaaatgggaaa

SEQ ID NO: 1894 - DNA, 583 bp, Homo sapiens
ctctaactgccccccgacccgatcagcgatggcggctgcgtcggggtcggttctgcagcgctgtatcgtgtcgccggcagggaggcatagcgcctctctgatcttcctgcatggctcaggtgattctggacaaggattaagaatgtggatcaagcaggttttaaatcaagatttaacattccaacacataaaaattatttatccaacagctcctcccagatcatatactcctatgaaaggaggaatctccaatgtatggtttgacagatttaaaataaccaatgactgcccagaacaccttgaatcaattgatgtcatgtgtcaagtgcttactgatttgattgatgaagaagtaaaaagtggcatcaagaagaacaggatattaataggaggattctctatgggaggatgcatggcaatgcatttagcatatagaaatcatcaagatgtggcaggagtatttgctctttctagttttctgaataaagcatctgctgtttaccaggctcttcagaagagtaatggttgtaccttcctgaattatttcagtgtcatggtactgcagatgagttaagttcttcat

SEQ ID NO: 1895 - DNA, 802 bp, Homo sapiens
ttttttttttttttgttatttcttaatattttaattatcattataatttggcagtaaaaatcacttttcacaaagacattacacttacattaacaaatcactcttgattcattcatttttgtttttccatttctcctggcagctttgtaagaatccataacttcaatatgtctaactcagttttgcttagctcatggtaaacatttggaaaactatgaaacttcgtggtcactcctagagattttaacattgagtttgtctcttctgcccaagaatgaagaactaactcatctgcagtaccatgacactgaaataattcaggaagtacaccattactcttctgaagagcctggtaaacagcagatgctttattcagaaaactagaaagagcaaatactcctgccacatcttgatgatttctatatgctaaatgcattgccatgcatcctcccatagagaatcctcctattaatatcctgttcttcttgatgccactttttacttcttcatcaatcaaatcagtaagcacttgacacatgacatcaattgattcaaggtgttctgggcagtcattggttattttaaatctgggaggagctgttggataaataatttttatgtgttggaatgttaaatcttgatttaaaacctgcttgatccacattcttaatccttgtccagaatcacctgagccatgcaggaagatcagagaggcgctatgcctccctgccggcgacacgatacagcgctgcagaaccgaccccgacgcagccgccatcgacctgacccggcggccgctcga

SEQ ID NO: 1896 - DNA, 192 bp, Homo sapiens
  misc_feature (1)...(192): n = A,T,C or G
gtctttggacatagcaccaggngacatgcttgacaaggnggcaagaagactttctttaataaaacatncanagngctccnccntgagtggngggaaagccatacancatttngccaaacaaggaaatanattnnattttgacatcaaacctcccttgcatcatgctaaaaattgtgantttncttttactgg

SEQ ID NO: 1897 - DNA, 643 bp, Homo sapiens
gtcgccacgcgtccggctggtcaagcgggacttcattaccggcttcacttgcctgcactgggccgccaagcacggcaggcaggagcttctggccatgctagtcaacttcgccaacaaacaccagctgccggtgaacatcgacgccaggacgagcgggggttacaccgccctgcacttggcagccatgcacggccacgtggaggtggtgaagctgctggtgggggcctacgacgccgatgtggacatcagggactacagtggaaaaaacccctcccagtacctgagtcggagcatcgccgaggagatcaagaacctggtgggagccctggacgagggtgacggggaaagcgccgcgggtagcggcggcgggcgctggaggctttcaaaggtgcttccctcgcatctcatcacctacaaactctcacacgccctagaagatggaggggaccatcaccaccatcaccactcggctgaggggtgggtcggaggcaaagccaaggatccagggcgcaaagcctcgggcagctctagtggacgtataaaacccagactcaacaaaatccgattcagaacccagatcgtccacaccacaccctctttcagggacccagagcagccgctggagggcaggggggaggaggga

SEQ ID NO: 1898 - DNA, 679 bp, Homo sapiens
  misc_feature (1)...(679): n = A,T,C or G
ttttctgcgcagatatgctaggtgtatccacaccaacatgaagacactgaccttgtcccgctacatctgcgagatgaccctgcaggaataccactatgtccaggagaaggcttccaagctagctgctgcctccttactcctggccctctacatgaagaagctcggatactgggttcccttcctggagcattacagtggctacagtatctctgagcttcaccccttggtcagacagctgaacaaactgctgactttcagttcttacgatagtctcaaggctgtgtattacaagtattctcacccggtcttctttgaagtcgccaaaatccctgccttggatatgttgaagctggaggagattttgaactgtgattgtgaggctcagggcctggtactctagcagcagccacagggctaagcatgcatgttaacagggtatatttattctatgttcgaatttgtcttttgatcgcttttattcatttttcctttctttgtcttttcccaaactgataaatggttataaatatttatgttgcttggtttttatgaaaagaaaaaatattgncatatttgactaccaaatttaaataaaaaaaataaatggggtaattggtaaaaaaaaaaaaaaaaagggcggggccgcttgactaagtcttagaggaaaaaaccttccaca

SEQ ID NO: 1899 - DNA, 643 bp, Homo sapiens; identical to SEQ ID NO: 1897

SEQ ID NO: 1900 - DNA, 679 bp, Homo sapiens; identical to SEQ ID NO: 1898
  misc_feature (1)...(679): n = A,T,C or G

SEQ ID NO: 1901 - DNA, 2293 bp, Homo sapiens
tccgcagaggatggaaatagtctgggaggtgctttttcttcttcaagccaatttcatcgtctgcatatcatgctcaacagaattcaccaaaaatccatgaaggctggtgggcatacaaggaggtggtccagggaagctttgttccagttccttctttctggggattggtgaactcagcttggaatctttgctctgtggggaaacggcagtcgccagtcaacatagagaccagtcacatgatcttcgacccctttctgacacctcttcgcatcaacacggggggcaggaaggtcagtgggaccatgtacaacactggaagacacgtatcccttcgcctggacaaggagcacttggtcaacatatctggagggcccatgacatacagccaccggctgaaggagatccgactacactttgggagtgaggacagccaagggtcggagcacctcctcaatggacaggccttctctggggaggtgcagctcatccactataaccatgagctatatacgaatgtcacagaagctgcaaagagtccaaatggattggtggtagtttctatatttataaaagtttctgattcatcaaacccatttcttaatcgaatgctcaacagagatactatcacaagaataacatataaaaatgatgcatatttactacaggggcttaatatagagggaactatatccagaggacctctagttttcatcacttacggtggggtcgatggactattccccacccctgctatgaggacagcaagttggatcataatgaacaaacctgtctatataaccaggatgcagatgcattccttgcgcctgctcagccagaaccagccatctcagatctttctgagcatgagtgacaacttcaggcctgtccagccactcaacaaccgctgcatccgcaccaatatcaacttcagtttacaggggaaggactgtccaaacaaccgagcccagaagcttcagtatagagtaaatgaatggctcctcaagtagggaacaaagccaagaagaatcccacctcagtgaaatgctacaactgtgaattgacgtaacctagaatgtcccccttcttgcttctctctccttctttcccccaagcctcattcattcttgggattggcccttttctttcatgaaaagtgtctgcaaaaccatggcagagggaatacatctcttcacacatactcacaaacacacacacaagcacttgcacatacatacaaacacatgccaaacataccctacacacacacacactccttacaacctcccatcatgggaagtcaagtttcagaaacaaaagtctcattcataagaggtcttagaagaaaataaccagttaacctgatttcaattttgataccgttttcctgaactaataaatctacccaatgagacttttcagcctttgtacatacaaaattcttccaaaagagagaggagaaaatacagctctgatggcatcaaacggactttgcatcaagtaatttcagatagtgtcctaggatcctttgagggtgctggtagcaggtgagcaggacaaagttgaccaaggacacttatttctagattatgattcttctgtttactcaacaatttacaaagaaaaaaaggacagacattgaagagctacacattgtatatatatcaccacagactataaggaaatggaattatttccctctttgtcacatatctgtagtaggatttgccaagatcagaaatgatccatttgctgtttcttgttttccaaaggtcatacattgtgtttggttattgttaccagctcaataaatgtgtttaacgagttaatttcatttttctggctttggtctgttctccttccttacaggctaagccctggctccatgcaactgcattctttgatttcacttgttccttcatctacatgttttgttcatttgcagccagtttttactgagtttgtggcaatcaggaatgcatttgctaagcaagtatgactttaattccactccatggctcaatcattcacatgaggtgagcttcagcctgagatagcaggcgacagacttcttgcgtttcaaaactgccatgcccccctgtgatgctcccgtgaaggaatgcactttgccttgtaagttcctgggaaaggggtatgttttctctccaggtgcagccagatctcacaaagtacaaaacgaatgcctttcttttcttgtttataatggtcactcactgtgtttggttactgtcaagaaatcaataaatgtgtttaacaagttaaaaaaaaaaaaaaa

SEQ ID NO: 1902 - DNA, 473 bp, Homo sapiens
  misc_feature (1)...(473): n = A,T,C or G
gtcgccccgcgtccgagtgcctatgcccagattgtgcagtttgggatgacgtgagaacgctgggccacggtgtcctttgacttccccagacaaggcgaaaccatggtggagaagccatacagtgaggctactgcccagctcattgatgaagaggtccggtgcctcgtcaggtctgcctataatcggaccctggagctgctcacacagtgccgggagcaggtggagaaggttggcaggcgtctcctggagaaagaagtgctggagaaagccgacatgatagagctcttgggccctcggccctttgcagaagaagtccacctatgaggaatttgtagagggcaccggcagcctagaggaggacacatcccttcctgaggggctgaaagactggaataaggggcgggagggaaggaggcactgagcggggcttgcangagagccctgtgtagcctgtggccaccggggcggcttat

SEQ ID NO: 1903 - DNA, 607 bp, Homo sapiens
  misc_feature (1)...(607): n = A,T,C or G
tcgaccccgcgtccgccccgcgtccgggcatctggggaaacctttcttccatggcccagtacacacccctgtaccgagccaacaccagaaatctcagtgtggaccgaagcctaaggaccctgaaaacagctgcagatgaagatggcaagcacccgctgcaagctggccaggtacctggaggacctggaggatgtggacttgaagaaatttaagatgcacttagaggactatcctccccagaagggctgcatccccctcccgaggggtcagacagagaaggcagaccatgtggatctagccacgctaatgatcgacttcaatggggaggagaaggccgtgggccatggccgtgtggatcttcgctgcgatcaacaggagagacctttatgagaaagcaaaaagagatgagccgaagtggggttcagataatgcacgtgtttcgaatcccactgtgatatgccaggaagacagcattgaagaggagtggatgggtttactggagtacctttcgagaatctntatttgtaaaatgaagaaagattaccgtaagangtacagaaagtacgtnagaagcagattccagtgcattgaagacaggaatgcccgt

SEQ ID NO: 1904 - DNA, 1515 bp, Homo sapiens
  misc_feature (1)...(1515): n = A,T,C or G
cccctccacccctcatctccgccggcgagtagggccaggtgttgggagctcccacgtgggacaagatggtgtcttcggcgcagatgggcttcaacctgcaggctctcctggagcagctcagccaggatgagttgagcaagttcaagtatctgatcacgaccttctccctggcacacgagctccagaagatcccccacaaggaggtagacaaggctgatgggaagcaactggtagaaatcctcaccacccattgtgacagctactgggtggagatggcgagcctccaggtctttgaaaagatgcaccgaatggatctgtctgagagagcaaaggatgaagtcagagaagcagctttgaaatcctttaataaaaggaagcctctatcattagggataacacggaaagaacgaccacctctagacatcgaccaaattaaagaactcttcaaaacaaaaaaacaagacaaagacaataggtgcaggtatatattgaagacgaagttccgggagatgtggaagagctggcctggagatagcaaagaggtccaggttatggctgagagatacaagatgctgatcccatttagcaaccccagggtgcttcccgggcccttctcatacacggtggtgctgtatggtcctgcaggccttgggaaaaccacgctggcccagaaactaatgctagactgggcagaggacaacctcatccacaaattcaaatatgcgttctacctcagctgcagggagctcagccgcctgggcccgtgcagttttgcagagctggtcttcagggactggcctgaattgcaggatgacattccacacatcctagcccaagcacggaaaatcttgttcgtgattgacggctttgatgagctgggagccgcacctggggcgctgatcgaggacatctgcggggactgggagaagaagaagccggtgcccgtcctcctggggagtttgctgaacagggtgatgttacccaaggccgccctgctggtcaccacgcggcccagggccctgagggacctccggatcctggcggaggagccgatctacataagggtggagggcttcctggaggaggacaagagggcctatttcctgagacactttggagacgaggaccaagccatgcgtgcctttgagctaatgaggagcaacgcgnccctgttccagctgggctcggcccccgcggtgtgctggatcgtgtgcacgactctgaagctgcagatgnagaaaggggaggacccggtccccacctgcctcacccgcacggggctgttcctgcgtttcctctgcagccggttcccgcaggcgcacagntgcggggcgcgctgcgacgctgagcctcctggccgcgcagggctgtggggcagatgtccgtgtnccaccgagaggacctggnaaggctcggggtgcaggagtccgacntccgtntgttcctggacggaganatcctccgccagacagagtctccaaaggctgctngccttatccantcagnttcaanagt

SEQ ID NO: 1905 - DNA, 1515 bp, Homo sapiens; identical to SEQ ID NO: 1904
  misc_feature (1)...(1515): n = A,T,C or G

SEQ ID NO: 1906 - DNA, 287 bp, Homo sapiens
  misc_feature (1)...(287): n = A,T,C or G
ntcgagccaagcaggccacttcttgngttgttgaaggtctcaggatctgtccatcgcagcagaaatatccaaggaggntcacaaacaacttgaaagatggtgaaagaatataagagaattgttctgctgaaaggactttgaatggtntcaataagcatcattttagcttatttaagtcatctgctggccagagatttaagtcttggaaagagacaaccaagagaaatcttncacaattcagattgctaacatgatggaagagaaatacaaacccgttgctggattgg

SEQ ID NO: 1907 - DNA, 425 bp, Homo sapiens
tccggttaggtatcaagctgtagctggtaggtaccagcaccaccaaacagaagtgaactagtgaggtatgggctaagagagcccaaacttggacctgtagagctgtcggaccaggaaaggggatctgtttcgtctcagtccccaggctttgcttactgggctcctggatcaagggagcttgagttctcgctgcctcacctccagctccccaagtctgaactgtggtcactggtcttctggtctggacttgatccttcccccagatcaccatggccatggccaaggccagaaagccccgggaggcattgctctgggccttgagtgaccttgaggagaacgatttcaagaagttaaagttctacttacgggatatgaccctgtctgaggggccagcccccactggccagagggggagtttggagggg

SEQ ID NO: 1908 - DNA, 262 bp, Homo sapiens
  misc_feature (1)...(262): n = A,T,C or G
aatgatgcaatgganggngtgctggngtcnncctgtgncccgngcataggagcatntnaggnctccaggtcctctcctttggggcttactgnacccccatgctacgaaccgnaancagggacngcctctgtcgcctgtccacctacttggaagaactcgaggctgnggaactgaanaagttcaagttatncctggggaccgngacagagctgggagaaggcaagatcccctggggaagcntggagaangccggtcccctgga

SEQ ID NO: 1909 - DNA, 873 bp, Homo sapiens
atgacggtggttcacagccttaccgttgccctgacggtcagccctgccctgcactcccccatgtacttcttcctgcgccaactctcagtggtggagctcttctacaccactgacatcgtgcccaggaccctggccaatctgggctccccgcatccccaggccatctctttccagggctgtgcagcccagatgtacgtcttcattgtcctgggcatctcggagtgctgcctgctcacggccatggcctatgaccgatatgttgccatctgccagcccctacgctattccaccctcttgagcccacgggcctgcatggccatggcgctgatcgccacctacggccgtgatcgtgatcctggccggccgttgtggttggggtcggtcaagtcgaacatcggtcatacgcaagcggcggcgggtgtggctggtgtgatcaagatggtgatggcgatgcggcacgggcagctgccacgcacgttgcacgtggaatcgccgtcgccggaggtggattggtcggcggggacggttcaactccttacggagaacacgccctggcccaggagtggtcgtgttcgtcgggtgggggtgtcgtcgttcgggatcagtggtactaacgcgcacgtcatcctcgaacagcccccgggagtgccgagtcagtctgcggggccgggttcgggttctgtcgtggatgttccggtggtgccgtggatggtgtcgggcaaaacacccgaagcgctatccgcgcaggcaacggcgttgatgacctatctggacgagcgacctgatgtctcctcgctggatgttgggtactcgctggcgttgacacggtcggcgctggatgaccgagcggtggtgctggggtcggaccgttaa

SEQ ID NO: 1910 - DNA, 5197 bp, Homo sapiens
  misc_feature (1)...(5197): n = A,T,C or G
ttttttttttttttttttgctgattaagtttaccgtgttatatgggtgcggttcatggcgccccgaaacaattacaataatatatcaaagatcactgatcacagatcactataacacatataataacaatgaaaatgcttgaaatattgcaagcaattaccaaaatgcaatgtagagacccaaaatgggcacatgctattggaaaaatggtgccaacagatttgcttaaagcagtgttgacacaaatcttcaatttctctgctttgcttttcttaacctattgctgtcacatatatgtcccaaaaccttcaatttctttaaaaattctgctacctgtgaagtgcaataaatcaaggcatgcctgtatactctctcctgttatcctttctccagcctctgcacccccctcagcctcagcccctctgcacccctgcccctggcaccttcccacacctgagctctgcgttgttaccctggggaaatgccaccctttagggaagtctccaacttattcagtctgtaactgtcagagcatacagatggctcatctatcttagcagttactgcatgtcactggtacttaattcagtcagccactcagccttttggggagcatttgttgagtgcctactctgtgccaagggagagctaatattgagcataagcacaggattcttgccttcagggagcttacagtctagtgggggaggcagagattaatcaaataatcacataaagaaagaacccattaaagaagtgcctggcaccctgtaggccttctgcaggtacctggtgagtgaacacagctgcaatcagggctgtgaaagatgtacggagggtgggcacttccctgaggaggaggtgtaaaggaaaagcaggggtgaacaggcgagtgggggaggaagggcactccaggtgtgcaggtccctgtgccagaaagaagagtggcctacaggaggacctagaggccggtgtgactggcgtgcagtgacaggaacacagttcaaggtgaggctggagagacagatgggccaggcaaagcagggcctttaaggccttcaaaagttttgatactggcagaagagcaaagaggcacctatgaaggctttcaggtagggagtaactaaccagcctgtattttgaaattatgagccatgcattggaaggttcactgaatcaatggaggaggccagttaggaggctattgctagagttaattgggttggttccatctccctactaaatggtaagtgccctaggacagaacctgtgcctggtacccttctaaaatcacagaaacacacacacgcacagagcccaggctgagcatgcacagaaaaggtaccccacacgcatgtctgaaatcagagttacccagcaacttccaacccaccagtttatgtacacagggccctggaggccttgggagcagtgggttgggaaagggagccaggcatcctgctgatcagcgtctcccatggtagaacccaggaacaaggctcccatcacttgctctgttaagcgttgttcatgttcacagcctgccggtccactccctgctcctggcaggggtacactaggctctgtccccagccttgagcagcaacagccaggtgtgctggcctctgccataccatcctggctcctcaacggtcctggcgtcgaagtggaggtgatgggggatgccgtactggaggcaagtcataatgtccagggatgtggctgttcttgggtgagtcatagtggccggggggtaggcccggaggcagagggggctgggagcccacagagtctcggtcatggatcagggggctgggctgctcgtaggtgccactgtctctctgtggctggggttgccgccgcctctggctgtcccagaactgaggaggctgcctggggggagatcctgagggagggcctttcatctccatgtagctgctctcccgggggccccctggcaagctgggcaggtcccggatggtggcatatgggttctcactgctcagggaagccacactggccccgagctcctcttcagagatgagccctttatcgtagaatgggcctgggccattgctgtagctatagctgtagcttcggtccaggcggctgctccccctgtccagaggccctggagggggctcccggcggtgcttccagtcagcaggcagggtggtgtggttatcatgcccttgggccccacctggccgctcagggttctgcaggctggcaaagagcgggcctggaaccttgttagggggtggggggtttggggagcactgcgacagggtgtggtagctggggttggagtagtagtgactgtagctcggagggacatctggcatgacatactcggagccgtccaggcgcccgctgctgtaagccacagccaggtggtggtgctccttgcctttttgccagtgccgatagccaatgaacagtgccaccagggctaccacaagggaccccagcactgcaatgccaatcactgcacccagcgagttatacgctactggagtggtcggcatcacagtaaagggctcctggattccaatcctgcaaggtgcaccactgtgccctgggggacatacacaggccccagtctctgggtggcacttttctccaggaccacactggcatggctgggagcagttagcaccaaatgtccccagagggcagccttctaagcagtggtgtccagtccagcctagggggcagatacagctcccatcctggggatggcaggtcccaccatggtgacattggcaggtctgggcacagttttctccccagtgtcctggagggcatggctgggagcagtcggggcctgtccagccagccaggcagtagcaggtcccgttcgaaggggtggcagaaggagtggttagcgcacttgcagggcacacagcgtttgccatagcggccaggctgacaggatctctggcaggaggggccccggaatccgggtgcacacacgcagttgccattctcagggagacaggtgcccccattcttgcaggtgcaggtgttgctacagttgactccccataagccctcagggcaggacaggtggcagcgggcacccatccagccagcctggcactgacagcgtccatgaacagggtcacagccatcagagtggtcacagtcacagcgactggcacaaccttctccaaactgccccttcggacagggcagctggcagtgggccccatgccacccaggggtgcaggtacaggctccagtttgggggctgcagactgcctcatgggcacactggcagctggcattgcaactgaagccccaggttccgggtgggcagggcacagagcagttaccacgctgccaaccttccttgcagacgcactcgccgtcgatgggtgagcaggcgatggcattttcacatgagcagcgtgcagaacagttgacaccgtaggtgtcaggaggacaaagactagcacagtgagggcccgtgtaacccggcgcgcactgacagaggccgctggtagcctggcagacgccaccgtgcaggcagagacagtgctcctggcaccctggcccatgcgtgtcctgcgggcagctctcgttgcagtggaggcccgcccaacccggcaggcaggagcactccccgttcatcgggtggcagctgaggctgtgctcccggtcgcaggtgcagggggcctggcagctgagaccgtagaagccgtcggggcagaggcgatccgtgcagcggtccccagtgaagccgtgttcgcacagacatgcgccgttggccgggaagcaacgggcgtccggggcgcagtcgcacgtctcagcacagtcctgcccaaagcggcccaccgggcactcctcccggcaccgatccccagtgtaacccggagcgcagcggcactgcccagtgaatcggtcacagaggccgccgttgtggcagcgacattcctgggagcagttgggtccgtgaaagccctctgggcagggcagggagcagatggtgcccatccagccaggggggcagctgcaggagccctgtggggtttggaagacacctccattttggcaaggatgggtgctggggcagaagaagccagaagtgccctgggaacaggacacgtcacagctgggcccagttctctctgcggggcagaagcaggctccagtctggggatcgcagggtgccccatggcactggcagcggaactggcaggcagggccatagtagccaggggtacagggctgaaggcagttcgggggcactggaacagtcgtcgccccgccagcctggcacacattggcactgattgggtgccacacaacggccatggacacactcctgggcacagagcgggacacagaaccccctgctctcatagaagccatggcagcactgcaggcgctggcggtggtccgtcttcaccaccacagtgtggccagggggaggccagggaaggggcaccactcaacactctgggctgagggcgcatagaaagcgcattccctgtttgaggttgcagtgcactacgatctcgccactgcactccagcccgacacagaccatgcagaatgaatccctagaagccaggagtttcctctgagtttgtgggctgggggcaagtatgggggccctcccagggccgctcgcagggctctgaggggagcaggctgaaggggcgggagtgggactccttggtggtggtagtgaagctttcccagaagctgcaggtattgggatcactggggttgagagttccagccagccgcaggcccacagccaggagaaggaggggacacagaggcggtgacattgcagaggccaggtggggcctgcccacagctcagccctggggcctgggacctggggcctgggggccagggaatgtcctgggggatcccagcgttcaggatatgaagcctgccttggggcaccgtctcccctgcggcctggggtaggaaccgccggggtctgcgaggaggaggactggacagccgaggacggggcgagggtccccgcttcgagcggacgcgtgggtcgactcctatagtgannnnnnnnnnnnnnnnnnnnnnnnnnnnncaaaantacactttcctacanncctaanaanaaaaaaaaaaacaaaccaattaacaaatcatttactttcaacaccaaccaacacccgaacccaaaacaaaaaaaaaaaaaaacaaaaagacttaa

SEQ ID NO: 1911 - DNA, 697 bp, Homo sapiens
  misc_feature (1)...(697): n = A,T,C or G
ttttttttttttcagatagaaacttgtgctttaatatatctctgtgtgtgtgagcatgagtgtgtgcgtgtgtgcaagtggaacagctgtctccagggcctcagtgcctggcctctgtccttgttctctgctcatccttgcagccaatgcaggccccctccctggcgggccggccctgcccctgggcaccccagctggcgggggtcagtctttggtacaatgtggacactttggtgtgccgggggcaaggttgggggggtggccacacagctctcatcatctctgcaacgccaagaggaagatggccatgggcccccacagctgtgggctggactggcagggggctccactgcccggcatcaccaccactttattgggatccgtctgcttccggggacactcccccttcttcagtgtgacgtcatctatggcaatatcccccaggtagcccgggcctcgaaccccctcaaaaataatctgtaagggcccactgtggctgatgggcacatgggcctgctgccacacattgcccttattgccactgagagaccaggcgtgcgtgtccagagcccctttgttccgggaccccaccangaggttgagggagcccgatgtgtttcccgtacatgtcttagaagaaagagacacagtagaactttggcgctggatttgagaggggactcactaaccttggcac

SEQ ID NO: 1912 - DNA, 752 bp, Homo sapiens
  misc_feature (1)...(752): n = A,T,C or G
ttagggagtcgaccacgcgtccgaacatctcccgcaggaccccctaatcttcagggcagctcccagagcatggatccctcctgattccactcagcccgatgttcctcacagtcaagctgctcctgggccagagatgcagtctgaaggtgtcagggcaagagagtgtagccacgctgaagagactggtgtccaggcggctgaaggtgcctgaggagcagcagcacctgcttttccgtggccagctcctggaggatgacaagcacctctctgactactgcattgggcccaatgcctctatcaatgtcatcatgcagcccttggagaagatggcgctaaaggaggcccaccagccgcagacccagcccctgtggcaccagctgggactggtcctagctaaacactttgaaccacaggatgccaaggccgtgctgcagctgctaaggcaggagcacgaggagcgcctgcagaagataagcctggagcacctggagcagctggcccagtaccttctggcagaggagcctcacgtggagccagctggagagagggagcttgaggcgaaagcaccggcctcagagctcctgtgacatggaggaaaaaggaggangcaacaactgatcaagtaaacnggccattcttaccatttgcatgctaaaaaaaaaaaaaaaaaancnnncnctnnactantctaaaaaaaaaacttcnnnnnnnnnnnnnnggggggggcccntttttttttttaaaaaaaaacc

SEQ ID NO: 1913 - DNA, 395 bp, Homo sapiens
ttcgagcggccgcccgggcaggtacggcctttgtaacatgcccacataagagctgtccatcctcccatatcacggtgctccaagttaaccccacatttcagtagttcctctacgatgtgcacatgcccttctttcgatgcagatataagtgctgtccaattatccaaatcttccagattgcagttagctccattcttaattaattccttcactatttccagattgccttgttcggcagctatcatcagtggagtctggccacactcatttctctcatctacatctttgcatttttcaagaagagctttcagagcaggaatgttttcttcctctacataatttatgacgctctgtgatatcaaaactgacattttcacagaaagctgcaattaact

SEQ ID NO: 1914 - DNA, 360 bp, Homo sapiens
  misc_feature (1)...(360): n = A,T,C or G
cgagcggccgcccgggcaggtaccgctgcgagtgcaagcctggctacgctggcaatggcatcatctgcggggaggacacagacctgngatggcttgncccaaatgagaaccttggtgttgccgtggccaantgcngacttacgcactgncaaanaagggataatttgctcccaacacttcccaacttcaggggcagnganagactatgtancagagggattgggaanntgggatgaatgcccctgtgnatgaatggancganttnaccaattgnntaanaaaattcccagggattgaccaggggtancaaacttgtttctcattttccantttaccaaaccccccagtctcaagttaatt

SEQ ID NO: 1915 - DNA, 1727 bp, Homo sapiens
cacgcgtccggcggtgacggcggcgcctggcggcggggatttggcgcgggccgggggccgggggccggggcgcgggggcgcgaggctggattcctagggccgcggcgcttcccggcatgctccgctgcaggcccgcgcccgcgcccggactttgccatcggcggggcagtcgcgggatgcgcccgggagccacagcctgaggccctcaggtctctgcaggtgtcgtggaggaacctagcacctgccatcctcttccccaatttgccacttccagcagctttagcccatgaggaggatgtgaccgggactgagtcaggagccctctggaagcatggagactgtggtgattgttgccataggtgtgctggccaccatctttctggcttcgtttgcagccttggtgctggtttgcaggcagcgctactgccggccgcgagacctgctgcagcgctatgattctaagcccattgtggacctcattggtgccatggagacccagtctgagccctctgagttagaactggacgatgtcgttatcaccaacccccacattgaggccattctggagaatgaagactggatcgaagatgcctcgggtctcatgtcccactgcattgccatcttgaagatttgtcacactctgacagagaagcttgttgccatgacaatgggctctggggccaagatgaagacttcagccagtgtcagcgacatcattgtggtggccaagcggatcagccccagggtggatgatgttgtgaagtcgatgtaccctccgttggaccccaaactcctggacgcacggacgactgccctgctcctgtctgtcagtcacctggtgctggtgacaaggaatgcctgccatctgacgggaggcctggactggattgaccagtctctgtcggctgctgaggagcatttggaagtccttcgagaagcagccctagcttctgagccagataaaggcctcccaggccctgaaggcttcctgcaggagcagtctgcaatttagtgcctacaggccagcagctagccatgaaggcccctgccgccatccctggatggctcagcttagccttctactttttcctatagagttagttgttctccatggctggagagttcagctgtgtgtgcatagtaaagcaggagatccccgtcagtttatgcctcttttgcagttgcaaactgtggctggtgagtggcagtctaatactacagttaggggagatgccattcactctctgcaagaggagtattgaaaactggtggactgtcagctttatttagctcacctagtgttttcaagaaaattgagccaccgtctaagaaatcaagaggtttcacattaaaattagaatttctggcctctctcgatcggtcagaatgtgtggcaattctgatctgcattttcagaagaggacaatcaattgaaactaagtaggggtttcttcttttggcaagacttgtactctctcacctggcctgtttcatttatttgtattatctgcctggtccctgaggcgtctgggtctctcctctcccttgcaggtttgggtttgaagctgaggaactacaaagttgatgatttcttttttatctttatgcctgcaattttacctagctaccactaggtggatagtaaatttatacttatgtttccctcaaaaaaaaaaaaaaaaaaaaaaaaaaaagggcagtcgacagactagtctaaaaaaaaaacc

SEQ ID NO: 1916 - DNA, 415 bp, Homo sapiens
  misc_feature (1)...(415): n = A,T,C or G
cncgcgtccggatatttaacagatggcccaattaactataaatataaaactaaatgtacttggctcattgaaggctatccaaatgcagtgttaagattaagattcaatcattttgctacagaatgtagctgggatcatatgtatgtttatgatggagattcaatatatgcacctttaatagctgtacttagtggtttgatagtccctgaaataaggggcaatgaaactgtgcctgaagttgttactacatctggctatgcactgttacatttttttagtgatgctgcgtataatctaactggtttcaacattttctattcaatcaattcttgtcctaacaattgctctggtcatgggaagtgtacaactagtgtctctgttccaagtcaagtatattgtgaatgtgataaatact

SEQ ID NO: 1917 - DNA, 518 bp, Homo sapiens
  misc_feature (1)...(518): n = A,T,C or G
ggagcttgtcngaccgctcatgccattgaccctcttanttctctcctgtttggcggagctgacaatggcggaggctgaaggcttgatccagatggaagctgtgaaagtgaaaacattaaagtctttgacggaacctccagcaatgggcctctgctagggcaagtctgcagtaaaaacgactatgttcctgtatttgaatcatcatccagtacattgacgtttcaaatagttactgactcagcaagaattcaaagaactgtctttgtcttctactacttcttctctcctaacatctctattccaaactgtggcggttacctggataccttggaaggatccttcaccagccccaattacccaaagccgcatcctgagctggcttattgtgtgtggcncatacaagtggagaaagattacaagataaaactaaacttcaaagagattttcctagaaatagacaacagtgcaaatttgattttcttgccnctatgatggccctccaccaactctggcctgat

SEQ ID NO: 1918 - DNA, 892 bp, Homo sapiens
  misc_feature (1)...(892): n = A,T,C or G
gaaaatggacttgtaagaaggctcatgccattgaccctcttaattctctcctgtttggcggagctgacaatggcggaggctgaaggcaatgcaagctgcacagtcagtctagggggtgccaatatggcagagacccacaaagccatgatcctgcaactcaatcccagtgagaactgcacctggacaatagaaagaccagaaaacaaaagcatcagaattatcttttcctatgtccagcttgatccagatggaagctgtgaaagtgaaaacattaaagtctttgacggaacctccagcaatgggcctctgctagggcaagtctgcagtaaaaacgactatgttcctgtatttgaatcatcatccagtacattgacgtttcaaatagttactgactcagcaagaattcaaagaactgtctttgtcttctactacttcttctctcctaacatctctattccaaactgtggcggttacctggataccttggaaggatccttcaccagccccaattacccaaagccgcatcctgagctggcttattgtgtgtggcacatacaagtggagaaagattacaagataaaactaaacttcaaagagattttcctagaaatagacaaacagtgcaaatttgattttcttgccatctatgatggcccctccaccaactctggccagattggacaaatcttgttggcccgtgttgactcccaccttccgaatccgtccatcaaactctctgactgtcgtgtttgtctacagattatgccaattccttaccggggaatttcctgcttcctacacctcaatttatggagaaaacatcaacactacatctttancttgctcttctgacaggatgagagttattataagcaactcctacctagaggtt

SEQ ID NO: 1919 - DNA, 458 bp, Homo sapiens
ccccccgctggctacaacgtgggacaatcagtgaccttcgagtgcctcccggggtatcaattgactggccaccctgtcctcacgtgtcaacatggcaccaaccggaactgggaccaccccctgcccaagtgtgaagtcccttgtggcgggaacatcacttcttccaacggcactgtgtactccccggggttccctagcccgtacttccagctcccaggactgtgtctggctgatcaccgtgcccattggccatggcgtccgcctcaacctcagcctgctgcagacagagccctctggagatttcatcaccatctgggatgggccacagcaaacagcaccacggctcggcgtcttcacccggagcatggccaagaaaacagtgcagagttcatccaaccaggtcctgctcaagttccaccgtgatgcagccacaggggggatcttcgccatagctttct

SEQ ID NO: 1920 - DNA, 419 bp, Homo sapiens
accccgcgtccggtgcagcctgacatgagccctggccaatgcaacgcaggggtgagccccccaggtgaaggtgctttctgctctatgtggaggctacatccaagggaagagtggaacagtcctttctcctgggtttccagatttttatccaaactctctaaactgcacgtggaccattgaagtgtctcatgggaaaggagttcaaatgatctttcacacctttcatcttgagagttcccacgactatttactgatcacagaggatggaagtttttccgagcccgttgccaggctcaccgggtcggtgttgcctcatacgatcaaggcaggcctgtttggaaacttcactgcccagcttcggtttatatcagacttctcaatttcgtacgagggcttcaatatcacattttcagaatatg

SEQ ID NO: 1921 - DNA, 540 bp, Homo sapiens
  misc_feature (1)...(540): n = A,T,C or G
taccttctggcccctctcttccttcagagatgctggcagagcatttccctaaggttgtagcaagtttaatcatcctccatttgtctggggcaaccaagaaaggaacagaaaagcaaaccacctcagaaacacagaagtcagtgcagtgtggaacttggacaaaacatgcagagggaggtatctttacctctcccaactatcccagcaagtatccccctgaccgggaatgcatctacatcatagaagccgctccaagacagtgcattgaactttactttgatgaaaagtactctatttgaaccgtcttgggagtgcaaatttgatcatattgaagttcgagatggaccttttggcttttctccaataattggacgtttctgtggacaacaaaatccacctgtcataaaatccagtgggaagaatttctatggattaaaatttttttgctgaatggagaagctggaatctatgggaatttcagctcgatacaanttcacacctgaataaaagggcaaactcccttagcgggnttttncaggg

SEQ ID NO: 1922 - DNA, 611 bp, Homo sapiens
acagacacacgcgccagcgcagggctagcgcaggcggcgagagcgcagggcggcgcggcgtcggtcccgggagcagaacccggctttttcttggagcgacgctgtctctagtcgctgatcccaaatgcaccggctcatctttgtctacactctaatctgcgcaaacttttgcagctgtcgggacacttctgcaaccccgcagagcgcatccatcaaagctttgcgcaacgccaacctcaggcgagatgacttgtaccgaagagatgagaccatccaggtgaaaggaaacggctacgtgcagagtcctagattcccgaacagctaccccaggaacctgctcctgacatggcggcttcactctcaggagaatacacggatacagctagtgtttgacaatcagtttggattagaggaagcagaaaatgatatctgtaggtatgattttgtggaagttgaagatatatccgaaaccagtaccattattagaggacgatggtgtggacacaaggaagttcctccaaggataaaatcaagaacgaaccaaattaaaatcacattcaagtccgatgactactttgtggctaaacctggattcaagatttattattctt

SEQ ID NO: 1923 - DNA, 684 bp, Homo sapiens
  misc_feature (1)...(684): n = A,T,C or G
gtccggcatctactggcgctactgcgacatcccctcctgtcacatgccaggctacctgggatgctttgtggactcaggggcacccccagccctcagcggccccagcggcacctccacgaagctcacggtccaggtgtgcctacgcttctgccgcatgaaggggtaccagctggcgggcgtggaggccggttacgcctgcttctgtggctctgaaagcgacctggcccggggacgcctggcccccgccaccgactgtgaccagatctgtttcggccaccctggacagctgtgtggcggcgatgggcggctgggcgtctatgaagtgtcggtgggctcctgccaggggaactggacagcgcctcagggcgtcatctactccccggacttcccggacgagtacgggccggaccggaactgcagctgggccctgggcccgccaggcgccgcgctggagctcaccttncgcctcttngagctggccgacccgngcgaccggctggagctgcgcgacgcggcttngggcagnctgctccgngccttngatggcgcccgcccaccgccgtccgggccgntgcgcctgggcactgccgcgctgctgctcaccttagcgaagcgacgcgcgcggccacgcgcaaggcttcgcgctcacctaccgaggtgagcctcagctcggcgcgccctgcc

SEQ ID NO: 1924 - DNA, 742 bp, Homo sapiens
  misc_feature (1)...(742): n = A,T,C or G
attccctttttttttttttccaaaaacaccattttaataaggaaacaacagaaataaaagattgttctctggctggagcccagaccccatataatacattacatgtacaaagtggcttggtggcatctcctcctaggtggtatatacaggaggtggagggacagcaggaagcaaggagccttgctgctggactgtggtgcaagtctgagttgacttccctagactgcccccacctagatggagacttcatattctctcgtctctccagtctcgtaagttggattgtcaaacgctgactctatggtaatgcggttgtaggggcgggggcgggggcgggtattccacctcataggaatcatacactggtggggcctccacgttgtccccattgcgaatgatgagcctgtcatcatcctctgccagggaaaccttctcaaagtgcaggtgtagccgctggccctcaggagcctcaagcagccagtgacaggtgaggttgttgctgtagttgcccgggaagcctggagagacgatgcggccggtggtggcattgcggatcactccgccgcaagcagcgatgcatacgggctcctttgaatcccagatgggctgggtggcattgagacaggtgagatgcctggcgcccttcagctggtagccagttgcacaantggaagcgggcactacctcctgngtggatgctggtgacagtcacatcttcataagcttgacgacggggaaagtg

SEQ ID NO: 1925 - DNA, 456 bp, Homo sapiens
ttttttacaataggaataacttttatttgtttatacaagttttgaatttcatctattttttatgtaaatagctcgatcttcaaaaatatccttcagctctgacaacctcttcacataactttcctgtaagatcttttaaatatccaaaccatatggtaggtggctcagaaccttctatttctaagtaatcatatttctcttccatttgaaaatcagtaaatatgagtgaaattgtgtccccaggctctgctacaatggtccaagtgcaatcagcattgttatggtactcattaggaaaactagggctggatatgatgccactggatcctctcattgttcctccacaagcatcttcagctctacagataggaacaggaaaatcccacgaagctgtattaactgaattggctatgcaggtgagctgagggtggccatcaaggatgtatccagttacac

SEQ ID NO: 1926 - DNA, 559 bp, Homo sapiens
ttttacattatgaataacttttatttgtttatacaagttttgaatttcatctattttttatgtaaatagctcgatcttcaaaaatatccttcagctctgacaacctcttcacataactttcctgtaagatcttttaaatatccaaacctgtaaaagtccacattcagttgttctttgttccttagtttgcttcaacaacatcaatgcaaggttaatagaagctatttacttaccatatggtaggtggctcagaaccttctatttctaagtaatcatatttctcttccatttgaaaatcagtaaatatgagtgaaattgtgtccccaggctctgctacaatggtccaagtgcaatcagcattgttatggtactcattaggaaaactagggctggatatgatgccactggatcctctcattgttcctccacaagcatcttcagctctacagataggaacaggaaaatcccacgaagctgtattaactgaattggccatgcaggtgagctgagggtggccatcaaggatgtatccagttacacagctgtagcggatcttgtc

SEQ ID NO: 1927 - DNA, 448 bp, Homo sapiens
cgccccgcgtccgggacgacgccgcagcccttgggggagtccagcgccagctggcgaaaagaagcttcatcttccagatcatccgggaaaggggcagaggtggccggttgttgcgactcataaacaacctcttcagcacaacccggttgaatgtggagttggttcctttgctggaaacctgtacagcttgaccgacagacagcctcaggatttatttatacatgtggtggaactttaaaaggacttaatggcactatagaaagccctggttttccatatggatatccaaatggtgcaaactgcacatgggtaataatagcagaagaacgaaatagaatacaaattgtttttcagtcatttgctctagaagaagaatacgactacttatcattatatgatggacatcctcatcctacaaactttaggacaaggttaacaggattccatc

SEQ ID NO: 1928 - DNA, 327 bp, Homo sapiens
  misc_feature (1)...(327): n = A,T,C or G
cccttagcgtggtcgcggccgaggtactgcaataatcacagcgtttatccgtgccttgatgtcaaaagttaagagagggtggagaccagacccgaactattgttttctgttcttggggaggaacagcttttggcaaatattggctcatatgaatggggagaggatttcaagaaggttcttcaaaaaatgttgtggcttatattaancctcnacagtcccttaagggggaactctagtctgattcctgtaccatcaccatctnttcaccaactggtagtagagaaaaatantttcaactgtacctgcccgggcggccgctcgaaaggg

SEQ ID NO: 1929 - DNA, 357 bp, Homo sapiens
  misc_feature (1)...(357): n = A,T,C or G
cacccaggcgtccgaaagaggactctgcgcctggtgctctggactgcagaagaacaaggaggaattggtgcctcccagtattatgagctacataaggcaaatatttccaagtacagcttggtgatggaagctgactcaggaaccttcttacccactggactgcagttnactggcagtgacaaggccagggctatcatgaaggaagtcatgaatcttctgcaacccctcaatgtcaccaaggtctttagtaatggagaaggaactgatattaacttctggatccaagcttggagtncctggagccagtctgcntgatgacttgtacaagtattnctttttccatcattcccacggaga

SEQ ID NO: 1930 - DNA, 427 bp, Homo sapiens
  misc_feature (1)...(427): n = A,T,C or G
ncncgtccgggtctgcaggcctaccgggtgttgtggcccgctgctgctccgcagagccctcgtgatcaggaagaaaagcaactaggaacaatgaggtcccttttcttcctgttcattgttcaccttttagccttgggctctggtaaagctgtattcaagaatggtgtttctcagcgaacatttcgagaaataaaagaagaaatagccaactatgaagatgttgctaaagcaattatcaaccttgctgtttatggtaaataccagaaccggtcctatgagcgtttgggacttctagttgatactgttggacccagactgagtggctctaagaacctagagaaagctattcaaatcatgtaccaaaacctgcagcaagatgggctagaaaatgttcacctggagcaggtcanaataccccactggggag

SEQ ID NO: 1931 - DNA, 579 bp, Homo sapiens
gccagagcttgggtagaatgctggccgattatcgagccagaggaggaagaattcagcccaaaaattcagacccttttgctcattcaaaggatgcatcaagtacttcaagtggcaaatcaggaagcaaaaacgagggtgatgaagagagagggcttattctgagtgatgctgtgtggtcaacaaaggtggactgtctgaatcccattaatcaccagagactttgtgtgctcttcagcagctcttctgcccagtccagcaatgctcctagtgcctgtgtcagtccttggattgtaacaatggaattttatggaaagaatgatcttacattaaggaatatttttagaagagatactgtttcaagcccccttaccaaatcacaagcatgttctgtgatacccccatggtacatcatattcggcgctttgttcatggccaaggctgtgtgcagataatcctgaaggagttggattctccagtacctggatatcagcatacaattcttacatattcctggtgtagaatctgcaaacaggtaacaccagttgttgctctttccaatgagtcctggtctatgtcatt

SEQ ID NO: 1932 - DNA, 590 bp, Homo sapiens
  misc_feature (1)...(590): n = A,T,C or G
nnnnnnnnnnnnnnnnnnnnnnnnnnnnnnaaaaaaacagtaaaattttatttattatgcaatcatttccaaagtagacagagaaatagatcagatatcccaactgtattgactacagaaaatagtcacaaccacttcatagaaattgtactgtttttcctaaattaacagcatatctgggtacacacaacatgtttgaatattttaatccctggccaggcatgctagctcacgcctgtaatcccagcacttggggaggccgaggtgtgagccactgcccccagcctgtaaatcttatcagacagaatagcttccctcacccatttagggcgggatatgattatggattctctcttccaatgagttttctccccagttggcatctattactgacaatagctgagctatatgtgagtagggaggagagggaaagaatggggctagagagaggcctgacctggtgatagttggagaggttgctatgcatgtcagcaatgtcctcactggatacttctttgatgaccagagtccgatcgtaggagataaggaagcgaccatcactgccttcactttcgctgggggggtttcgg

SEQ ID NO: 1933 - DNA, 532 bp, Homo sapiens
cacgcgtccgcgccgcttccggggtcgggcgcctggatagctgccggctccggcttccacttggtcggttgcgcgggagactatggcgtcctcctcggtcccaccagccacggtatcggcggcgacagcaggccccggcccaggtttcggcttcgcctccaagaccaagaagaagcatttcgtgcagcagaaggtgaaggtgttccgggcggccgacccgctggtgggtgtgttcctgtggggcgtagcccactcgatcaatgagctcagccaggtgcctcccccggtgatgctgctgccagatgactttaaggccagctccaagatcaaggtcaacaatcaccttttccacagggaaaatctgcccagtcatttcaagttcaaggagtattgtccccaggtcttcaggaacctccgtgatcgatttggcattgatgaccaagattacttggtgtcccttacccgaaacccccccaccgaaagtgaagacatccatggtatctacctatccactgcgatcgcgcacaggatc

SEQ ID NO: 1934 - DNA, 1837 bp, Homo sapiens
  misc_feature (1)...(1837): n = A,T,C or G
ggcttgtgatgcgcaatatgtttagccaccgtcttcctgtgcacaggaagtatgacctcaagggttccctagtgtcccgggaagccagcgataaggaaaaggttaaagaattgcccacccttaaggatatggactttctcaacaagaaccagaaagtatatattggtgaagaggagaaaaaaatatttctggagaagctgaagagagatgtggagtttctagtgcagctgaagatcatggactacagccttctgctaggcatccacgacatcattcggggctctgaaccagaggaggaagcgcccgtgcgggaggatgagtcagaggtggatggggactgcagcctgactggacctcctgctctggtgggctcctatggcacctccccagagggtatcggaggctacatccattcccatcggcccctgggcccaggagagtttgagtccttcattgatgtctatgccatccggagtgctgaaggagccccccagaaggaggtctacttcatgggcctcattgatatccttacacagtatgatgccaagaagaaagcagctcatgcagccaaaactgtcaagcatgggggctggggcaagagatctctactgtccatccggagcagtatgctaagcgattcctggattttattaccaacatctttgcctaagagactgcctggttctctctgatgttcaaggtggtggggttctgagacacttgggggaattgtggggatattctagccaccagttctcttcttcctttgctaaattcaggctgcaggctccttccatccagataactccatcctgtcgagtaggctctttctgaccctcagaaatacattgtcctttttcctctttgcccatttttcttccctctcttcctccccatgagaagtctgcttgtagtattagaatgttattgttgactctctcccaagtgccttgatctttgtaatatctcctgttgtttctatgatataggagctaggggaagggggttgtttgccttcttcaggacctgactggacagatggacctggctcaagcaactactctggatgcactttgctgtgtgggatgaactaaaagtgtctgaattttgctgataactttataaaactcactatggcatgcttccctcctggtgggccctaggatggatgacactcaagatactacagatgtgggtgcaggcatgcacacacacgatggaatatggccattcctacacaggtggggtagagagtgggtcagcagcctggcacctcacagaggtgggacctaagaggactcatgattatgcagagaattggattgggtctctgtcatagattgagtaatctcttcccttacctcaattccatctccacccatctctacatctgggcacagcaacccagagatggccaaaagcattcaagcctgggggaagatgtttgactattgctgctcttcaccagaacctcacacctctcctgggactggaacccttcagtgggtgtgtggccagttttggaggctggaatgatgggccacggtgtatgattcattctccaaataaaatttaccttaaatccaacataacaatccccaagcatattttcaaaaggaaagaaatacccaaacttgaaaaaattcaaggaattaaagaacaaaggactccaaaaacctgggaaatcccctactcactgaataccaataccaattacacttccctctaccacaaacccccccagctaaagtgaatcaattgattaacagctacctaaaaacctacnattcnnactctnnntcatcaaanaantatccaagtgagggacattggcttg

SEQ ID NO: 1935 - DNA, 163 bp, Homo sapiens
cttcaaggaggtctctgagtagggtgggagtgcactggacgtagttggcagaaacaatgtcacaggccagaggggagcaggtcatgggggccaatgcctaactgtgtaacaggtgccggcagctgcacctcactttgtgaactcggaacatgtggtactcagc

SEQ ID NO: 1936 - DNA, 428 bp, Homo sapiens
  misc_feature (1)...(428): n = A,T,C or G
nnnnnnnnnnnnnnnnnnnnnnnnnnnnnaaaaaggtaaatcatgtattctttattaggccaggaatcatcaagcaataaaagtaaaggaagaacttaaagtggtcattatattttcaatatcatttagtgttgttgctgcaaatggaaaatggaatgtcagtttgcccaaaggtaccatcagccttcaaaccatcaatatttcctgtcagactataatgttgtcaccaatattaggctaattttattaatcaaacaaacaattgcattaagcttctaagctttggctagaggagtaaaaatcgcataactttgaaaagtagacaaattcatgaaatgctgtctgtttgaccttccacagaaattgtgccgagcctgacacatgtgataaaccaagggctggcgatgtactggggcaccccgagatgg

SEQ ID NO: 1937 - DNA, 1347 bp, Homo sapiens
  misc_feature (1)...(1347): n = A,T,C or G
gtggtcgcggccgaggtacctgtccaaaactaccccatcaaggctcttttcagattgatgaatttgtccacactgaaagttcttcaacgaagatgcagctagtaaaacagaggcttgaaactgtcacagaggtgatacgttcctgtgctgcaaaagtcaacaaaaatctctcatttacttcaccaccagcagtttcctcacaacagtctaagttaaagcagtcaaacatgctgaccgctcaagagattctacatcagtttggtttcactcagaccgggattatcagcatagaaagaaagccttgtaaccatcaggtagatacagcaccaacggtagtggctctttatgactacacagcgaatcgatcagatgaactaaccatccatcgcggagacattatccgagtgtttttcaaagataatgaagactggtggtatggcagcataggaaagggacaggaaggttattttccagctaatcatgtggctagtgaaacactgtatcaagaactgcctcctgagataaaggagcgatcccctcctttaagccctgaggaaaaaactaaaatagaaaaatctccagctcctcaaaagcaatcaatcaataagaacaagtcccaggacttcagactaggctcagaatctatgacacattctgaaatgagaaaagaacagagccatgaggaccaaggacacataatggatacacggatgaggaagaacaagcaagcaggcagaaaagtcactctaatagagtaaagaattgaagaaaagttaagagctgccgaaatgcacagaggtgaaaatgacaaaccaaatggaatttctcttcagagttcagaattttcagatactaaggaggaagaaaggatccactacttcttgttcttatgaatgactctagaaaaatcagaatcaagttgtgggtggaaaaatcaacgtggcctttgagttcagttgttataaaccattgtgactattgttggtcaaagtattggtacttatattgttagtaattgcatcataattacattaccagtgttggaaaactaatgaagaaaacactgtaattgctactcagcaaatgtgaataaaaggtgtttgcgttattaaaaaatctgttaagtaatcatttaatattattatattggtaatggttgtatgtgtgatgctatgcccagaatatgaagtatctgtttttgaaattcactttatttaaaagataagccagcctgactgggcacggtgcctcatgcctgtaatcctagcaccttgggaggctgaggcaggtggatcacctaaggtcaggagtttcaacancaccagcctgacccaacatggtgaaacc

SEQ ID NO: 1938 - DNA, 278 bp, Homo sapiens
gtggtcgcggccgaggtacgaactccacggcggtggggcgctaactagcagggacccctgcaagtgttggtcgggggcctcgagctgcctgagctgacacgaggggaggggtctgtgtagccaacaggtgaccgaagggcttgcctgcccacagcttacttggccaaggggtttctgaagttcctgccggcaaacttagccttgctgcccagctcctcttcaattctgaggagctggttgtacctgcccgggcggccgctcgaaaaactaattccagc

SEQ ID NO: 1939 - DNA, 1445 bp, Homo sapiens
  misc_feature (1)...(1445): n = A,T,C or G
gtggtcgcggccgaggtaccagagatctcccttacatcaaagnactagtgtggggacgtcctcgtcatgagaaagaactcatccccatcctccattaccacttatgagacctgccagacctacgagcgtcccattgccttcactgcccgttccaggaagctctggatcaacttcaagacaagcgaggccaacagcgcccgtggcttccagattccctatgttacctatgatgaggactatgagcagctggtagaagacattgtgcgagatggccggctctatgcctctgaaaaccaccaggagattttaaaggacaagaagctcatcaaggccttctttgaggtgctagcccacccccagaactacttcaagtacacagagaaacacaaggagatgctgccaaaatccttcatcaagctgctccgctccaaagtttccagcttcctgaggccctacaaatagtaaccctaggctcagagacccaattttttaagcccccagactccttagccctcagagccggcagccccctaccctcagacaaggaactctctcctctctttttggagggaaaaaaaaaatatcactacacaaaccaggcactctccctttctgtctttctagtttcctttccttgtctctctctgcctgcctctctactgttcccccttttctaacacactacctagaaaagccattcagtactggctctagtccccgtgagatgtaaagaaacagtacagccccttccactgcccattttaccagctcacattcccgaccccatcagcttggaagggtgctagaggcccatcaaggaagtgggtctggtgggaaacggggaggggaaagaagggcttctgccattatagggttgtgccttgctagtcaggggccaaaatgtcccctggctctgctccctagggtgattctaacagcccagggtcctgccaaagaagcctttgatttacaggcttaatgccagcaccagtcctctggggcacatggtttgagctctggacttcccacatggccagctttcttgtctatacagatcctctctttctttccctacgtctgcctggggtctactccataagggtttacaaatggcccacaacactgagttagtggacaccggctaaatgaggaagagcagcaggcattgtcatggtgaatgccccgctgtagctccctgagagaaagactgtaactctgcaggacagaaacaaggttttaaagcattgccaaaaaaaaaaaaaaaaaaaaaaaaaaatgtatcatctaaaggactagacacagaacaattggaagtcaacttcaaacactaaaaaaaaaaataaaaaaaaaaaaaaaacaaatcgaacagacccatgtgatcgccctgggggagccctactccccttgctacatgttgtccttaaacatggttattgacctgaaaa

SEQ ID NO: 1940 - DNA, 288 bp, Homo sapiens
  misc_feature (1)...(288): n = A,T,C or G
agtggtcgcggccgaggtgtcangnccatnctgtggctggagaattacctgcatacntngccctgcaccatcctattcgnctcccacgaccgcaactttttgnatgccatcgccacaagacatcatccacctgcacagccancggctatatggttaccggggagactttgngaccttcatnaagagtaagcaggatcngctgctcnaccagcancgngnatatnangcncagnancaatatcnccagcncatccaggntttcattgaccggtttcgntacaatgccaa

SEQ ID NO: 1941 - DNA, 442 bp, Homo sapiens
  misc_feature (1)...(442): n = A,T,C or G
ccacgcgtccggcctcatggaanagaacanatcctgtgcgtggggctggtggtgctggacatcatcaatgtggtggacaaatacccagaggaagacacggatcgcaggtgcctatcccagagatggcagcgtggaggcaacgcgtccaactcctgcactgtgctttcttgctcggagcccgctgtgccttcatgggctcgctggcccatggccatgttgccgattttgtcctggatgacctccgccgccattctgtggacttacgatatgcggtccttcagactgagggctccattcccacctctacagtcatcgtcaacgaggccagcggcangccgcaccatcctgcacgcctacaggaacctgccagatgtgtctgctaaggactttgagaaggtcgatcttgacccggtttcaagtggatccacattgaggggcccgg

SEQ ID NO: 1942 - DNA, 528 bp, Homo sapiens
cccgcgtcccgtcttgcttcaataaggctttccttatttcatgattgtggccattcacaggatggtatttctgaatgacagtattatccagggagtcatggtcatcaaaagttatgaaagcaaagcccctcttcttgccactgcctcagtcagtcatgatttcagtcactttattttccatactgttcaaaattatttcttaggtgatggtcttcggtgtctttttttttaatgccactacaatctttttcacatttaagtggttacctggtctctgaagttcttcatttgagacagctctgtttggttccacaactcttccatccaccttgtatggtgtattcgtccaatttgatgccactgataaagacatactcaagactgggtaatttataaaggaaaagaggtttaatggacttacagttccacgtggctggggaggtgtcacaatcatggcagaaagtgaaaggcacatcttacatggcagcaaggcaaagaacaaatgagaaccaagcaaaagggagtttc

SEQ ID NO: 1943 - DNA, 1744 bp, Homo sapiens
ttttattttttttctgatggcaatgtttttaatgagtctgaattcgttaatgaaggggaaaatttattatttttttttcccaatgactcccaagtcctactcgcaaacatttacattgtagaaaaaagtttaattgctggttattgtttgaatcttgaaatacaattcttcactgatgatactggtataaaatggtggttattaattcatgctagcacaaccaaaactaatttaacattattggtaaaaatgagtcatttttgaatctctattaaaatctgaacacataaacaaatctgtgctaaaactggaactgccttctcactctacatataattaaacttccagcttcaaccatctgatgttgaaatctaaagcacctccatgagttaaatgtccccgacaaaccatgtagatggacaaacaagattggtggtctttaattgctggcgacagaaaaggctgcagtttagtacttaaacctgcagttagtggtcaactttctatccaggcagagtaaactaaggagagctatgaaatatcaaaagaaaactagaggccaggacaaagaggcaatgtcagccaagccactgcaagatggtatgcacccctgtatttcagccaagggcaggcaatccaaaattacacactgctttccttaacttgaccaaacagtgtatttttcctctgaaaatcttgtcaaaggttgtattccattgtacctagtgaaatacaaagtccactcctcataaaaatattatatttttcaaaagaaatataatacattgaaaatcactgattgctgcttcttcgtctttttttccgtgaatgtgtaggtgtttgagtctcttgtatttcttcttttacacaggatatgggctgtttgaaaactatttcatcatctttatcatcatcattcagttcagccacttgagattttcgcctctccaaaaatgttggtgtacaaactggtgtggggccctggctatccacagtcttctcaggagtgtcaagagtacctgaaacttttttcttcttcttacgtaaaacctggccttttgtagacgtctgacgattagtttttgaaatactttccgttttctgtaaaatcaaagaaggaaaatcatagtcaattccttttttagctaatttcttcctgagtaatctttctttctttttaaatcgctcctccatccgtagcttttgtgttagtgtccgattccgattataccgtttcactgatggatatgatggctgcttaaatggaatattccagtctttaaagagttctttatgtactttttcaggtggcataaaatgacactccaagagtctttcaccaaacaggtagttgttcattgtttcagcaactattttggcaacatcctcagactcaaactccacaaatgcatagcctttgctatttccagtccttttacttctggacagcctgaaccgtgtcacagtgccaaactgggagaaatatgaaaagatctgggtttcgtcaagtaggttaggtaggtggcgcacatagactactccaggagtaagttgttcttgtttttttcgctgggttatgcgcttgcgaacctgcgccacctccttttgaaactcgacatcttcctgcggattaagcgacaggattggcccagccgggccagaaaaagtcgccatgccaaaagccgccgacgctaaccacgcggcgctcccggaaacgtcgggctcccagctcccccgcggacgc

SEQ ID NO: 1944 - DNA, 494 bp, Homo sapiens
  misc_feature (1)...(494): n = A,T,C or G
aaagaaatataataccattgaaaatcactggatngcggcttcttcgtcttnttttccgtgaatgtgtaggtgttnggagtctctngtatttcttctttaacaaccaggatatgggctgtttgaaaactatttcatcatctttatcatcatcattcagttcagccacttgagattttcgcctctccaaaaatgttggtgtacaaactggtgtggggccctggctatccacagtcttctcaggagtgtcaagagtacctgaaacttttttcttcttcttacgtaaaacctggccttttgtagacgtctgacgattagtttttgaaatactttccgtttttctgtaaaatcaaagaaggaaaatcatagtcaattccttttttagctaatttcttcctgagtaatctttctttctttttaaatcgctcctccatccgtagcttttgtgttagtgtccgattccgattataccgcccacgcgtccgcccacgcgtccg

SEQ ID NO: 1945 - DNA, 436 bp, Homo sapiens
  misc_feature (1)...(436): n = A,T,C or G
tagggagtcgaccaccgtccgccggggtggagggacctgcggactcgtgggacgctggccctaggagctggcgggagcagcgccggcgttcccaaanatgctcccggctcatcccagcgcttctcttccagggccgcgcggggcgctgagcctgctgcttctgctgctagcgccanccagncgcccannctctggctgtcccgcgccatgccgctgctctgagacgcgcgtggactgcgggcgccgcgggctgacctgggcctcgctgccggctgccttccctcccgacactacagaattggtgctgaccgacancaacctgacggcgctgccgcccgggcttctggatacgctgccggcgctgcgcaaaagtgcacctgggcgctaacccatggcgctgcgactgtcgcttattgccgctgcgcgcctggctggc

SEQ ID NO: 1946 - DNA, 497 bp, Homo sapiens
  misc_feature (1)...(497): n = A,T,C or G
agggagtcgacccacgcgtccgaatacgacctagatcacgagcggcgcactttttttttttttttttttttttngggcttctgcagcttttatttttgcaagtaaaccactggggggagtcttgatggtgtgggcaccctagagattacgctggagttcagagggctccagacactagctgaaaagtaggtgacagaaacaatgattcagactgatcacatgattacaaagctgggggctccagcagggctccaggtggtcggggtggacatctaaggaagcagtgacatgggaggggcaagcactgggccagccttgagccgcctggatgacagagacagaggatctggtagctccagggatctccggtccatgccttacttggccagggggttcctgaaggacctgccggcaaacttggctttgctgcccagctcctcctcgattctaaggatctgattgtacttggccaggcgctcagatcggcagggggcacc

SEQ ID NO: 1947 - DNA, 3075 bp, Homo sapiens
  misc_feature (1)...(3075): n = A,T,C or G
aagggagtcgacccacgcgtccgtcgggaaggagagaaaatggcggcggagccgaacaagaccgaaatccagactctttttaagaggcttcgcgcagttccaaccaacaaggcctgtttcgactgcggcgccaagaatccgagttgggccagcatcacgtacggtgttttcttgtgcattgactgttccggggtgcaccgctccctgggcgtccatctgagcttcatcaggtccacagagttggattccaactggaactggttccagctgaggtgtatgcaggtcggcgggaatgccaatgcgacggctttttttcgccaacatggatgcacagccaatgatgccaacaccaaatataatagccgagctgcccagatgtaccgggagaagatccggcagctggggagtgcggccctggctaggcatggcactgatctttggatagacaacatgagtagtgccgttcctaatcactccccagagaagaaggactctgatttcttcacagaacacactcaaccccctgcctgggatgcgccagccactgagccttcagggacccagcagccagccccgtctacagagagcagtggcctggcacagccggagcatggccccaacacagacctgcttggcacctcacccaaagcctcactggaactgaaaagctccatcattggcaagaagaagccagcagcagctaagaaagggctgggtgccaagaaaggcctaggggcccagaaggtgagcagccagagcttcagtgagattgagcggcaggctcaggtggcagagaagctccgtgagcagcaggcagccgatgccaagaagcaggcggaggagtccatggtcgcctccatgcgtctggcctaccaggagctccagattgatcgtaagaaagaggaaaagaagctacagaatctggaagggaagaagcgagagcaggcagaaaggttgggcatgggcttggtatcccgaagctctgtctcccactccgtgctgtctgagatgcaggtgattgagcaggaaaccccagtgagtgcaaaatcctctcgctcgcagctggacttgtttgacgatgttggtactttcgcctctggacccccaaagtacaaggacaatcccttttccttaggggaaagctttggctcccgctgggatacagatgctgcctggggtatggacagggtagaggagaaggagccagaagtgaccatctcaagcatccggcctatttcagaaagagccacaaaccggagggaagtggagaaccggagctcaggcctcgagtctagtgaggcgcgtcagaaattcgcaggagccaaagccatctcatctgacatgttctttgggcgggaggtggatgcggagtatgaggccaggtctcggctgcagcagctctcaggcagcagtgccatcagctcttcagacctctttggggacatggatggagctcacggagcaggaagtgtatctctggggaacgtgctgcctacagcggacattgcccagtttaagcagggtgtcaagtctgtggctgggaaaatggctgtgctggccaatggtgtgatgaattccttgcaggatcgctacggttcctactgatccgagctctgtgactcaggcttacgatggtgacggcaacaagaactccacagttcccaggctggggatgctttgccttgtggaagctggggaggatttgttacttcgtatgtgtggtgtgtgtgtggggtggcctttgaggcgctcactcctgtgaggggaatggtcagtaccagcccttgtcctctgcctgtggactgagccctttattccctctcacaccaccctccgtgtgttagactcttgtccttctgtcctgcccccacagctgctgctcacttatcctgccatactgggaaagggggttcccccacgatggcttattctgggtccagactttccccaggtagggaaagcggaaggtagaaggctttttttgctggctctagggttcttctagttcgaggccttgggtccccatcctctggaaccagggggaggcctggaaggagttcactgtagacccgtcccatggggaaagaggctgcggacttgctgctgctgctgctgccagtggcctcttctgggtgccaggagaggggaaggacctttgtctgggcgttaccaagggctggaaactttacctggtacctaaaggtttcatttggtatcagaccggagacccttgggttctcccgtctcaccacccctttctacagtaagcacttggaagattgtttcagggtgtctcagggtccctctgtaccatctgctgtggaatgcaggaccctctgtgacattctttatcccttcttccccgggttggtggccatggagggtcttgtctgctgtgattcgactctggatgctgtgagcttgatgctggccagggaagcagaggatgtgagaggcagaggcaggctcctggggctgagctccttcctctgcatcattctgggcttggcctggacagcacccgccagtgagagctgtgggcctcaccctctggcagctgagccaagcactgtcattcttggtgccatcttcccctgccgcaccggcagtctcagcccagcccccacctttgggttgtaggttgggctcccaagcaacacagaccactcttccccttgcccctcccccagagggacttgactttctttctggactgtttgtattgaaacaaagtggtgtcaaaataaagcccctgcagggcctggctccctgttggtctgagtgaaaaaaaaaaaaaaaaaaaaaaaaanaaaaaaaaaaaannnnnnnnnnnnnnnnnnnnnnnnnnnnnnnnnnnnnnnnnnnnnnnnnnnnnnnnnnnnnnnnnnnnnnnnnnnnnnnnnnnnnnnnnnnnnnnnnnnnnnnnnnnnnnnnnnnnnnnnnnnnnnnnnnnnnnnnnnnnnnnnnnnnnnnnnnnnnnnnnnnnnnnnnnnnnnnnnnnnnnnnnnnnnnnnnnnnnnnnnnnnnnnnnnnnnnnnnnnnnnnnnnnnnnnnnnnnnnnnnnnnnnnnnnntt

SEQ ID NO: 1948 - DNA, 963 bp, Homo sapiens
  misc_feature (1)...(963): n = A,T,C or G
tccagctgatttctggttcctgtacatcactttaccttttttgtctataaattcattttgaccacgaggcacccccggagcctcggtgaatctgctgtgattttgtaggctgccggattcacaaatcggtaactgataaatgaaacttaccctaagcctaattcatcataaatttttcttttatcagatggtgtcacaagaaggatctgaagtggagcttctagtatccccaggagcgcgaagtgaacacggaaggtacctgcaggatccaattgtgtccattgatctctcagagtggctgaggataatagagtttcttcttcaaggtctcaaggtctgaagcatcccacagaatgatcctactgaataactcccataagctgctggccctatacaaatccttggccaggagcatccctgagtccctgaaggtgtatggctctgtgtatcacatcaatcacgggaaccccttcaacatggaggtgctggtggattcctggcctgaatatcagatggttattatccggcctcaaaagcaggagatgactgatgacatggattcatacacaaacgtatatcgtatgttctccaaagagcctcaaaaatcagaagaagttttgaaaaattgtgagatcgtaaactggaaacagagactccaaatccaaggtcttcaagaaagtttaggtgaggggataagagtggctacattttcaaagtcagtgaaagtagagcattcgagagcactcctcttggttacggaagatattctgaagctcaatgcctccagtaaaagcaagcttggaagctgggctgagacaggccacccagatgatgaattttgaaagtgaaactcccaactttttagtatgcccagcttgggatgttctcttatttcttgggcttgttaaatgacaacttggaagccnaggngaaggaatnaggaggnagcctgcatttacatca

SEQ ID NO: 1949 - DNA, 497 bp, Homo sapiens
  misc_feature (1)...(497): n = A,T,C or G
nggtnggatttggtgtgctgggtccagagggccagcttgtctcttggattgtgatggaacagtcctgtgagttgagaatgggttatactgtccccaaatacagacaccaaggcaacatgttgcaaattggttatcatcttgaaaagtatctttctcagaaagaaatcccattttatttccatgtggcagataataatgagaaaagcctacaggcactgaacaatttggggtttaagatttgtccttgtggctggcatcagtggaaatgcacccccaagaaatattgttgattgattccactgtccatttcaaatctttcttatcagtaaaaaaacattaattcaaacacaagcattgtgatctacattagcacaaaatgcaactgattatctagggatctggcgtattacttaagctcacccttaacagttttaccttncttctcctctgnattcttacagaaaattagaagctcaattttatgggctcataatttt

SEQ ID NO: 1950 - DNA, 495 bp, Homo sapiens
  misc_feature (1)...(495): n = A,T,C or G
cccgcgtccgagctacagaaacctttccttgccatactgagaaactgcagcaggcagtgtgcctacaggtctacaaagaaacttcaggtatatggcgccnttttcaacataaaagataaaaaccctttcaacatggaggtgctggtagatgcctggccagattaccagatcgtcattacccggcctcagaaacaggagatgaaagatgaccaggatcattataccaacacttaccacatcttcaccaaagctcctgacaaattagaggaagtcctgtcatactccaatgtaatcagctgggagcaaactttgcagatccaaggttgccaagagggcttggatgaagcaataagaaaggttgcaacttcaaaatcagtgcaggtagattacatgaaaaccatcctctttataccggaattaccaaagaaacacaagaccttcaagtaatgacaagatggagtttttgaagtggatgatgataacaaggaaggaaac

SEQ ID NO: 1951 - DNA, 345 bp, Homo sapiens
aggtacctgtcagtgttcaatatttaacaaactccagttaaacaggtaagaggtcagcagtagcttataggccttggttctattatccatgtgcccaactgcagccatcgtgggctggtgttaaaattttcctttcaattgtcatttttctaataattgcaatcagtgagaggagaagaaaaagttcaagggaatgacctgacctttcaccatcctacacaggagatgactgatgacatggattcatacactaatgtatatcgtatattctccaaagaccctcaaaaatcgcaagaagttttgaaaaattctgagatcataaactggaaacagaaactccaaatc

SEQ ID NO: 1952 - DNA, 359 bp, Homo sapiens
  misc_feature (1)...(359): n = A,T,C or G
ngacaactggaagcgagggaagaatgagaggagcctgcattacatcaagcgctgcatagaagacctgccagcagcctgtatgctcggcccagaggagatcccggtctcatgggtaaccatgggacccttcttgtgaagtaggaatggcctacagcatggaaaaataccgaagancaggcaacatgggcacgagtgatggtgcgatacatggaaatatctgcgtcagaaggaatatttccatttttacatctctgtgttgggaaggaaantgaaggantccccgcagatttgtggggggcagttttggtttcttttgaggcctnctgttgagttggcaccantgganttgcttacccaca

SEQ ID NO: 1953 - DNA, 361 bp, Homo sapiens
attttttttctatggtgaactcccaactttaagaatgccctgttggttatctcttattcagggctggtaaatgataactggaggtgcaggaagaatgagaggagctggcgttacatcaagcactgtataggaggcctgccagcagcctgtatgctgggtccagatggggctccggtatcatgattaaccttggactcttcttgtgatgtaggaatagcctacagcatggaaaaataccaaagggcagacgacatggcacgggtgatcatgggattcatgaaatatctgcatcagaataatagtccattttacttctcttttctagaagtaaatgatgactcccacagatttgtggggcagt

SEQ ID NO: 1954 - DNA, 178 bp, Homo sapiens
ccttgggtttgcctccactgggagatatcacctttgatctcagcaggaaaggagtcacttccttggctcgttcagctgccatatttagaatgcgctttgtttgtttgactttcatcgactacaatggctgcactatatgtatagactacttcaagctaggctgagaactttgaatctg

SEQ ID NO: 1955 - DNA, 419 bp, Homo sapiens
accaccaaaatgccagaatttattcaccaagtgagcatgggtaacatccatggatgagagtttaaacatctcttggttgctatggagggtccaagaagaaaacaaaatccattagtataaaggtttgtatttgctgtgacctctattgtcttgagagacagagtagacagaagaaataacaaatgtgaagtcctggaatatagatgagcttgtgatgaaagaggaacagagtgaaggtcagagctgttggaggaagaaagcaggaagggcaataaaggtccaagtggtagccagagcctcggtttattctagatgagaagggagatggtggagtcttttaagcaggagagaaacatgttctgagttacattttttaaaaatgtaattctgatttctttgtacaacattgattgtaggaa

SEQ ID NO: 1956 - DNA, 687 bp, Homo sapiens; identical to SEQ ID NO: 74
  misc_feature (1)...(687): n = A,T,C or G

SEQ ID NO: 1957 - DNA, 139 bp, Homo sapiens
ctcccagcctaacagaggctgctgaggcgcacttctgcacatcagaagatagtacatcataccactgagaggtaccttgatcgaaaagctgacttgtgaatttgctgactgcagccaagaactggtcctcactgaagtg

SEQ ID NO: 1958 - DNA, 868 bp, Homo sapiens
  misc_feature (1)...(868): n = A,T,C or G
tgtataaaaggtgctccccattaaaaatgtagctactattgacagataaaactgaaaaagagtgaatggatgactcaattatttttaaaggaagcattaaccactaaccagataatataccaacaaattacccagcagcactaagtataccatgtaagattcagttccagaacacagctacatttctgtgtccatcacagtaattagtccttaaaagttgtacttaaaatgtcaatctttaataaactcaaaaataatttattgagatttcatcttgtagtctacggattatgagttgcgaatagaggctgaggtccccccaagtgttatctgcaggctgctgtgttgatgcagagctgggaagatcacagatccatggagggagaaggcacttgtcttccaggagatcacttcgggacagggcaggcctgaccctgcgacggcaccttcaactcttgagccagaagctggtacctacaaggaactcatctcatgaccttcatttgccagcagtgccacacgttacctacagcaccacaaaactcagaatatattctagaagtttttgtcggttgcattgaggtagaaaagtgctgctcagttctaaaacagacactctcttttgtttggtctccttgaaaaccccaatatccttaaacattttcacagcattcttcacaagacaatatgtggcactctcagcatatactgcaacatttctttctgttctggttattaggtatttgtgcaacttttgcagatactcaggttctggaacaggaccactgaagttgtgaacaaagatggcagcagagcgntaggcctccagcaaagggccaaggagtctctgtaagaaggtgataaaacg

SEQ ID NO: 1959 - DNA, 396 bp, Homo sapiens
  misc_feature (1)...(396): n = A,T,C or G
agcagctngtgcggaaggcggccagcctgttctaccttctctccaatgaaggcaccatctcactgccttgccagacattttaccaagtctgccatgaaacagtaggaaagtttatccagtatggcattcttacagtggcagagcacgatgaccaggaagatatcagtcctagtcttgctgagcagcagtgggacaagaagcttcctgaacctttgtcttggagaagtgatgaagaagatgaagacagtgactttngggaggaacagcgagattgctacctgaaaggtgagcccaatccaaggagcaccagcagtttaacaacttcttacagagactccttgggcctttgctgggaggnctacagctctgctgccatntttgttcacaactttcagt

SEQ ID NO: 1960 - DNA, 450 bp, Homo sapiens
gaccacccgtccgcacgccttgtggcggctttgcggagctgctgctttggcgggagttggaagctggtgtgaggtttctgtggggagaaggagagtgccagaggtgactggttcatggttcttctaggctctcatggccaccatgttggaaggcagatgccaaactcagccaaggagcagccccagtggccgagaggctagcctgtggtcgtcaggctttgggatgaagctggaggctgtcactccattcctggggaagtatcgcccctttgtgggtcgctgttgccagacctgcacccccaagagctgggagtccctcttccacagaagcataacggacctaggcttctgcaatgtgatcctggtgaaggaggagaacacaaggtttcggggctggctggttcggaggctctgctatttcctgtggtccctggagcagcacatcccccc

SEQ ID NO: 1961 - DNA, 612 bp, Homo sapiens
tccgctatgatcgcattatcgaaggtcactacaatggtgaacaactgggcaaacctaagaagaatgagagcctgtggagtgtagcaagaggtgttattagaatgttacgaaaaaactatggttgtgtccgagtggattttgcacagccattttccttaaaggaatatttagaaagccaaagtcagaaacccggtgtctgctctactttccctggagcaagcgttgttaccagctatacttccttcaagacccagtgatgctgctgatgaaggtagagacacgtccattaatgagtccagaaatgcaacagatgaatccctacgaaggaggttgattgcaaatctggctgagcatattctattcactgctagcaagtcctgtgccattatgtccacacacattgtggcttgcctgctcctctacagacacaggcagggaattgatctctccacattggtcgaagacttctttgtgatgaaaggggaagtcctggctcgtgattttgacctggggttctcaggaaattcagaagatgtaagtaatgcatgccatacagctgctgggaaattgtgtcacaatcacccacactagcaggaaccatgagttttttat

SEQ ID NO: 1962 - DNA, 485 bp, Homo sapiens
  misc_feature (1)...(485): n = A,T,C or G
accccgcgtccggtggacccccataactgggcctctcctggccctcaaggaagaggaccagctcctggtcaggagactgagctgtcatgtcctgagtgccagtgtagggagctctgcggtgatgagcacggccattatggcaacgctgctgctcttcaagcatcagaagggtgtgttcctgtcgcagctcctggggggagttctcctggctgacggaggagatactgttgcgtggctttgatgtaggcttctctgggcagctgcggagcctgctgcagcactcactgagcctgctgcgggcgcacgtggccctgctgcgcatccgtcagggtgacttgctggtggtgccgcagcctggcccaggcctnacacacctggcacaactgagtgctgagctgctgcccgtcttcctgagcgaggctgtgggcgcctgtgcagtgcgggggctgctggcaggcagagtgccgccccaggggccctgggag

SEQ ID NO: 1963 - DNA, 308 bp, Homo sapiens
cacgcgtccgcagttctgaacaagaggggactggggggtcccactagcaccccacctaacctgatcagccaggagcagctggtgcggaaggcggccagcctgtgctaccttctctccaatgaaggcaccatctcactggtgagtgaagacccttcagtgttgcctggtctcttttcttgagcgttttcatgaaaacgtaaccccccgtgtttttctgttagataatgtttgacccattgttgatactttatattccactcctggatttcagtgaccaccaaaccaatatgtcatttactatcttggtt

SEQ ID NO: 1964 - DNA, 440 bp, Homo sapiens
  misc_feature (1)...(440): n = A,T,C or G
ccccgcgtccgaagcccaagtgaggaatggggtgagtgtggctttagacccaccgtcttcagatctgcaactttaaaatggaaagaaagcctaatgagtcggaaaaggccatttgttggaagatgttgttactcctgcactccccagagctgggacaaatttttcaaccccagtatcccgtctttgggtttgcggaatgttatttatatcaatgaaactcacacaagacaccgcggatggcttgcaagacgcctttcttacgttctttttattcaagagcgagatgtgcataagggcatgtttgccaccaatgtgactgaaaatgtgctnaacngcantagagtacaagaggcaattgcnnaagtggcttgctgaaattaaacccttgatgggttnttgcccagcagcaaattaaaaaagccgttaaccaaaagtgaaaa

SEQ ID NO: 1965 - DNA, 442 bp, Homo sapiens
  misc_feature (1)...(442): n = A,T,C or G
gcaagtcatctgagaactcacaggttgccagtnggtggaagtggggccccacccttgtctgctgacttgccctcatctcttcctagctccccatactttcttactgtggctgctgggattgtcatgatttgttgagcgtaaccatttgacagggttttattctctctcttcagctgagagtgccacatattgtcttgtgaagaatgctgtgaaaatgtttaaggatattggggtaggtgtccaccatttatgggtataaaagctatcttcaacttctgttctctttaggatctagtctgtttgagctacctttgtgggtgggggtgggaccccgaggaggaaggcagtttctgctgggncttaaatggataaaagggccatttttggggggaacggggggcatgttaggggtgggggttgggggccantgtttngaagggtg

SEQ ID NO: 1966 - DNA, 310 bp, Homo sapiens
  misc_feature (1)...(310): n = A,T,C or G
tcctcacagacaaaggaactgctgtgttacagttcctcacaagcctctttaagccttttgtggaatcatatcagttactttgcagataccttttgcatgaagaggactacttcggtgagaaggaatacttggttgcagccaggaagttcacccgtcagcttctggatcaaggctcctctcagtgttacgatgcgctgtcttctgaactgcagaaaaatgccttaagcagctttccgtgagacntgggggtggtggaaaagaagaaggtagaatagtaantatgtgtattatgtgaacnggccttgccaca

SEQ ID NO: 1967 - DNA, 163 bp, Homo sapiens
tcacattaaatatacagtaattatttatctacttcttctccactgctccgagcctcccacaggctgctaaggcgtttttctgcacatcagaagataataactcatagcattgcgaggtcccttgatcgaaaagctgacttgtgaatttctgactgcagccaag

SEQ ID NO: 1968 - DNA, 621 bp, Homo sapiens
tttatgaataggatttttattaatggtatctggtctgtggctacaatgttatattttgctgtgcttgacagattttttaccattgagatgtttatggaagaaagtttgaatttgctgccaggcatctacctgtgcctttgagtgagcctttggctcacctccatagaatattgcctcacccaaaacagcgtgcacagaagctctagaaggaggaaaataaggtgggtcaatacagtgaccagtttctgggtaacagattatctggggtctttctttcccatgagcttgtagcctttcagaggctatctgagcatagaattcactcttccagctttgatcatccatgccaacaataaacaagaagggcacctgcgccttttccaatggaacaagactttggtgattgtgttcctccagtggattgctccaagtgtccataaaagtgagaaatcctgacttagtgatttttacttttcctagatcatcgacaagtttaggaataatcatatccttgtaatgtagaggagctactgtgttggctacacaggcattgataagtacagtggctgtgatgcccttcaagaaagaagccattgagagacacaggtcacctccttttga

SEQ ID NO: 1969 - DNA, 556 bp, Homo sapiens
aatttcaataccttttggtgtacaggtggtttggggttacacagatgaactgtacagtgatgaacgctgagattttagtgcacctgtcgcctgagtagtatacattgtacccaatatgtagttttttatccctctatattatcattattgtttgagaaaataagacattttgttctttctctgccaatctctctacccccaatctccttggcttcaaaaacttgtttgcttactgtcttttgagaaactaaagctccctgtgatttgtgatgttctccaggcagggggccctttcctgggatcattgatctgtttgggagcagcaggggcctttgtgaatacagggccagcctcctggccggacatggttttgctgtgcttgccctggcttatttcagatttgaagacctccccgaagatctgaatgatgtatatctggagtactttgaagaagccgtggactttatgctgcagcatccaaaggtgcgttctggtgatcaccttattttcctccttctagagcttctgtgcacgctgttttgggtgaggcaatatt

SEQ ID NO: 1970 - DNA, 514 bp, Homo sapiens
  misc_feature (1)...(514): n = A,T,C or G
gaccacgcgtccgcgagatggaggcgacgctgaaccttgagccctcgggccgcagctgctgggacgaaccgctgagcatcgccgtgcgcggcctggccccggagcagcccgtcacgctgcgctctgtcctgcgcgacgagaagggcgcgctcttccgagcccacgcgcgctaccgcgcggactcccacggcgagctggacctggcgcgcacgcccgcgctgggcggcagcttctcggggctcgagcccatggggctgctctgggccatggagcccgatcggcctttttggcgattggtcaagcgcgacgtgcagacgcccttcgtggtggagctggaggtgctggacggacacgagcccgacggcgggcagcggcttgcacatgcggtgcacgagcgtcacttcttggctccgggggtgcggcgcgtgcccgtacnagagggccgggtgcgcgccacgctcttcctgcccccagaacctggaccctttcctgggatcatagaacctttttggag

SEQ ID NO: 1971 - DNA, 438 bp, Homo sapiens
  misc_feature (1)...(438): n = A,T,C or G
ggttctcggncctcgacctttgaattccccgctccggctccaagatgtcagcaacgctgatcctggagcccccaggccgctgctgctggaacgagccggtgcgcattgccgtgcgcggcctggccccggagcancgggttacgctgcgcgcgtccctgcncgacgagaagggcgcgctcttccgggcccacgcgcgctactgcgccgacgcctgcggcgagctggacctggagcgcgcacccgcgctgggcggcagcttcgcnggactctagcccatggggctgctctgggccctggaacccgagaagcctttttggcgcttcctgaagcgggacgtacagattccttttgtcgtggagttggaggtgctggacggccacgaccccgagcctggacngctgctgtgccaagcgcagcacaagcgccacttcttccgca

SEQ ID NO: 1972 - DNA, 1221 bp, Homo sapiens
  misc_feature (1)...(1221): n = A,T,C or G
cgcgtccgtcttaatcttctacaacaagcaagttacattagtaaaactaacgacaaagcttattcaacaaagttaccgtaaaatacacctttaatgacaaagacatggctttaatgttatccaggagacatctgattcacatagggttactgaacactagaatctgatcttgaatctctcatgtcaacaacagacaaatgcattacaatttagggacagctgttttctgggtacctcccaggtgtttgcagaagaaggctagaatttgcttccaggcatcttcctgggccttagaatgagccctgggctccccaccccatataacatgtttgttcagtaatctgtgaagggaagctgggcacagggggaagtaaggaggctcgatgtaatgcccagtcccagggtaacagatgatctggggtttttcctttccatgggcctgtaaccgttcagagactgtttgggcatacaactcacttctccagttatggtcatcctgaccaacaatgagcaggatgggcccctgggccttctctattggaatcatgctggggttcttgtaccctcctacgagagcattccttatatccacgatgtccacgaggcctgagaaagctaccttgattctcctcaggtcatagcccaatggtggaatgctactgtgcttatagttgatggctgtgttcccactgatcccagatccattgatggaaactgtggctgagacattcttcaagaatgaggccattgagagacaaatatcagctcctagagaaatgcccaaaagcccaatgcctgggccttttaccctggggatgttgaagcatgtagcatacggctcttcgaagtactccagggatatgttgtccatgttattggggagatcttcaaagttataataagctagagccaacgtggcaaagccatggccagcaaggaggctggctcgatattccaagaggccccctccaataccaaagatgtcaatgatccctgggaagggtccaggtcctggcggcaggaagagcgtggcgcgcacccggcccgctngcaccgactggcgccgcacccctggcgngaggaagtggcgntngtgntgcgccnggcacagcagccgtccaggntnggggtngtggccgtccagcacctccaactccacgacaaaaggnatctatacgtcccgcttcaggaagcgcnnnacaggcttctcgnttccaancc

SEQ ID NO: 1973 - DNA, 838 bp, Homo sapiens
  misc_feature (1)...(838): n = A,T,C or G
gctgtttgtgatgtgtttgtggaaaactatgtccctggcaaactgtctgcaatgggcctgggatatgaagatatagacgagattgctcctcacatcatctattgttccatcacagggtatggtcagacaggtccaatttctcagcgagctggttatgatgctgttgcctcggctgtttctggtctgatgcacatcacagggcctgaggtggcgtgtttgtctcacatatctacaaactaccttattggtcaaaaggaagcaaaacgttggggtacagctcatggcagtatcgttccttaccaggcttttaaaaccaaggatggctatattgtagttggagcaggaaataaccagcagtttgccaccgtctgcaagatcttggatttgcctgagttgattgataattccaagtataaaactaaccaccttcgggtacacaaatanaaaaaagagcttattaaaaaaatatctgaacggtttgaagaagaactgaccagcaagtggttatatctttttgaaggcagtggagtcccgtatggcccaatcaacaacatgaagaatgtatttgcagaacctccaggttattacacaatggcctccgttatggagattgggancatcccaacttgtggggaaaagatttcccgtccccaggcccagcttgttgagatacagtaatttccaagatgtccagaagccaagcccgcccccgctgctccgggcagcacacaacgcacatcctgaaaggaagtccctgaaatacnaagacaggccatcggggaacctgctccacgctgatttgntggaaccacatgaactccctgacaaaggaaaaagg

SEQ ID NO: 1974 - DNA, 1245 bp, Homo sapiens
atggctaccgagagtactccctcagagatcatagaaagagaaagaaaaaagttgcttgaaatccttcaacatgatcctgattctatcttagacacgttaacttctcggaggctgatttctgaggaagagtatgagactctggagaatgttacagatctcctgaagaaaagtcggaagctgttaattttggtacagaaaaagggagaggcgacctgtcagcattttctcaagtgtttatttagtacttttccacagtcagctgccatttgcggcttaaggcatgaagttttaaaacatgagaatacagtacctcctcaatctatgggggcaagcagtaattcagaagatgctttttctcctggaataaaacagcctgaagcccctgagatcacagtgttcttcagtgagaaggaacacttggatttggaaacctctgagtttttcagggacaagaaaactagttatagggaaacagctttgtctgccaggaagaatgagaaggaatatgacacaccagaagtcacattatcatattcagttgagaaagttggatgtgaagttccagcaactattacatatataaaagatggacagagatatgaggagctagatgattctttatacttaggaaaagaggaatatctaggatctgttgacacccctgaagatgcagaagccactgtggaagaggaggtttatgatgacccagagcacgttggatatgatggtgaagaggacttcgagaattcagaaaccacagagttctctggtgaagaaccaagttatgagggatcagaaaccagcctattccattggcaggcggcaccaggcagcacaagtcatcgcacaggtgtgaccgttgaggattattggggcccggcaccggttggttctacgcctgtgaatccttggcccctttggcgagctcagggaggttcgagtaccagtcgttggccaaagcattggcggagacctccagtctgcgtgcgcgccgcatcactaggcactttgtcccatggcgctgggcgggcaccgccacgctgttatcctcgagctagttgcgggatggtctggagggtagggaaggactgccccctgcagcccgtgaggagggtgcgaaggcctgccaggtggagccgcgacggtcgaatccgcagcatgcagattacacatgaccgtgggaatgcaccagtagcgaagcgcaatcggttactcaatgaattgactcagataggaagaagttga

SEQ ID NO: 1975 - DNA, 1566 bp, Homo sapiens
atgaaggctgaactactggagacatgggacaacatcagttggcctaaagaccacgtatatatccgtaatacatcaaaggacgaacatgaggaactgcagcgcctactggatcctaataggactagagcccaggcccagacgatagtcttggtggggagggcaggggttgggaagaccaccttggcaatgcaggctatgctgcactgggcaaatggagttctctttcagcaaaggttctcctatgttttctatctcagctgccataaaataaggtacatgaaggaaactacctttgctgaattgatttctttggattggcccgattttgatgcccccattgaagagttcatgtctcaaccagagaagctcctgtttattattgatggctttgaggaaataatcatatctgagtcacgctctgagagcttggatgatggctcgccatgtacagactggtaccaggagctcccagtgaccaaaatcctacacagcttgttgaagaaagaattggttcccctggctaccttactgatcacgatcaagacctggtttgtgagagatcttaaggcctcattagtgaatccatgctttgtacaaattacagggttcacaggggacgacctacgggtatatttcatgagacactttgatgactcaagtgaagttgagaaaatcctgcagcagctaagaaaaaacgaaactctctttcattcctgcagtgcccccatggtgtgttggaccgtatgttcctgtctgaagcagccgaaggtgaggtattacgatctccagtcaatcactcagactaccaccagtctgtatgcctattttttctccaacttgttctccacagcagaggtagatttggcagatgacagctggccaggacaatggagggccctctgcagtctggccatagaagggctgtggtctatgaacttcacgtttaacaaagaagacactgagatcgagggcctggaagtgcctttcattgattctctctacgagttcaatattcttcaaaagatcaatgactgtgggggttgcactactttcacccacctaagtttccaggagttttttgcagccatgtcctttgtgctagaggaacctagagaattccctccccattccacaaagccacaagagatgaagatgttactgcaacacgtcttgcttgacaaagaagcctactggactccagtggttctgttcttctttggtcttttaaataaaaacatagcaagagaactggaagatactttgcattgtaaaatatctcccagggtaatggaggaattattaaagtggggagaagagttaggtaaggctgaaagtgcctctctccaatttcacattctacgactttttcactgcctacacgagtcccaggaggaagacttcacaaagaagatgttgggtcgtatctttgaagttgaccttaatattttggaggacgaagaactccaagcttcttcattttgcctaaagcactgtaaaaggttaaataagctaaggctttctgttagcagtcacatccttgaaagggacttggaaattctggagtga

SEQ ID NO: 1976 - DNA, 1650 bp, Homo sapiens
atggcctctaggcagtgggtgttctataggagagattgtagaaataaagacacaagacaaagagagagaagaaaaggcagctgggcctgggggaccactaccaccaagacgtggagaccggtagtggccccgaatgcgtggccgcgccgttatttattgtatacgaggcaaaagggcaggcttaggcggagagagattggggatctcaggagcctggtgctctgctgggaggagaaacggcccacggagctgcttcttaacagcttaattcggaagaagctgctccctgagctatctttgctcatcaccacacggcccacggctttggagaagctccaccgtctgctggagcaccccaggcatgtggagatcctgggcttctctgaggcagaaaggaaggaatacttctacaagtatttccacaatgcagagcaggcgggccaagtcttcaattacgtgagggacaacgagcctctcttcaccatgtgcttcgtccccctggtgtgctgggtggtgtgtacctgcctccagcagcagctggagggtggggggctgttgagacagacgtccaggaccaccactgcagtgtacatgctctacctgctgagtctgatgcaacccaagccgggggccccgcgcctccagcccccacccaaccagagagggttgtgctccttggcggcagatgggctctggaatcagaaaatcctatttgaggagcaggacctccggaagcacggcctagacggggaagacgtctctgccttcctcaacatgaacatcttccagaaggacatcaactgtgagaggtactacagcttcatccacttgagtttccaggaattctttgcagctatgtactatatcctggacgagggggagggcggggcaggcccagaccaggacgtgaccaggctgttgaccgagtacgcgttttctgaaaggagcttcctggcactcaccagccgcttcctgtttggactcctgaacgaggagaccaggagccacctggagaagagtctctgctggaaggtctcccgcacatcagatggacctgttgcagtggatccaagcaagctcagagcgggctccaccctgcagcagggctcttggagttcttcagctgcttgtacgagatccaggaggaggagtttatccagcaggcctgagccttccagtgatcgtgccttaacagtgagctcggaccccagaactgctggtattgtgtttcacaagctcattggtttgagcttgtacagtgtcagcaaagggaccactctagacccacattttggcatccctgaggaaaacgggaaagggacagctgctggggtcgtcctgtgctctgaggtgcctccagggtcagggccgcctgtcagtccccctcgcattccccctttccaggccaagggcaaggaatctgggccagatagctccccctatctctccagcccccctcccctcccagccataaaaatagcaggagaaattgggacggacgccgagggggtgagggcgggggcacggcccgaggaggagaaccaggtgtccgagcactcacgtccgtctgggggcccttcccagcgcctggacactcgaaggtcacaaattcgtggcatcgtcgatgaaccacaaagctgcagactatag

SEQ ID NO: 1977 - DNA, 314 bp, Homo sapiens
  misc_feature (1)...(314): n = A,T,C or G
aaccaccacttgagagagggcctttgggacgggaagaagaacaagatggtgacaatagccacgccggtgacagcatcagaaacaaacccaggattgaagaagctggcccagccagggatgaacttcgggtcccgggtgaagangaagatggcaaacatgcagaaaangatgaaaacagcctgttcggcaaacttgatgggccccangttctggtattcttcccnaattacagctcgagccctatctttctgcattggttcttatctcanatttattcttcctccagcccctgaagctcagtcccccgtacagga

SEQ ID NO: 1978 - DNA, 513 bp, Homo sapiens
aagcttccccatgggggggtcctctggaggtgaacaaaagttgatttctgaagaagatttgaacggtgaacaaaagctaatctccgaggaagacttgaacggtgaacaaaaattaatctcagaagaagacttgaacgggatccccgggcccgagctcgaattcatggaggaggacttattccagctaaggcagctgccggttgtgaaattccgtcgcacaggcgagagtgcaaggtcagaggacgacacggcttcaggagagcatgaagtccagattgaaggggtccacgtgggcctagaggctgtggagctggatgatggggcagctgtgcccaaggagtttgccaatcccaccgatgatactttcatggtggaagatgcagtggaagccattggctttggaaaatttcagtggaagctgtctgttctcactggcttggcttggatggctgatgccatggagatgatgatcctcagcatcctggcaccacagctgcattgccaagtggaggc

SEQ ID NO: 1979 - DNA, 2126 bp, Homo sapiens
  misc_feature (1)...(2126): n = A,T,C or G
gtgcccgcctgcaggtaccggtcccggaattcccgggtcgacccacgcgtccgggctttgtctcgtgggctggtccccagcggctccctccccgaacagctgctgctccagggaggaagcggcgcgggtgctgtccagcttcccggtgctgaaaaccggagggctcgtcatccaccactaccatgtaagggccatgagaagggctcatcaagcttcgccgccaccatggaggaggacttattccagctaaggcagctgccggttgtgaaattccgtcgcacaggcgagagtgcaaggtcagaggacgacacggcttcaggagagcatgaagtccagattgaaggggtccacgtgggcctagaggctgtggagctggatgatggggcagctgtgcccaaggagtttgccaatcccaccgatgatactttcatggtggaagatgcagtggaagccattggctttggaaaatttcagtggaagctgtctgttctcactggcttggcttggatggctgatgccatggagatgatgatcctcagcatcctggcaccacagctgcattgcgagtggaggctcccaagctggcaggtggcattgctgacctcggtggtctttgtaggcatgatgtccagctccacgctctggggaaatatctcagaccagtacggcaggaaaacagggctgaagatcagcgtgctgtggactctgtactatggcatccttagtgcatttgcgcccgtgtatagctggatcctggtgctccggggcctggtgggcttcgggatcggaggagttccccagtcggtgacgctgtatgccgagttccttcccatgaaagccagagctaaatgtattttgctgattgaggtattctgggccatcgggacagtgttcgaggtcgtcctggctgtgttcgtgatgcccagcctgggctggcgttggctgctcatcctctcagctgtcccgctcctcctctttgccgtgctgtgtttctggctgcctgaaagtgcaaggtatgatgtgctgtcagggaaccaggaaaaggcaatcgccaccttaaagaggatagcaactgaaaacggagctcccatgccgctggggaaactcatcatctccagacaggaagaccgaggcaaaatgagggaccttttcacaccccattttagatggacaactttgctgctgtggtttatatggttttccaatgcattctcttactacgggttagttctactcaccacagaactcttccaggcaggagatgtctgcggcatctccagtcggaagaaggctgtagaggcaaaatgcagcctggcctgcgagtacctgagtgaggaggattacatggacttgctgtggaccaccctctctgagtttccaggtgtccttgtgactctgtggattattgaccgcctggggcgcaagaagaccatggccctgtgctttgtcatcttctccttctgcagcctcctgctgtttatctgtgttggaagaaatgtgctcactctgttactcttcattgcaagagcgtttatttctggaggctttcaagcggcatatgtttacacacctgaggtctaccccacggcaacgcgggccctcggcctgggcacctgcagcggcatggcaagagtgggtgctctcatcactccgttcatcgcccaggtgatgctggaatcctctgtgtacctgactctggcagtttacagtggctgctgcctcctggctgccctggcctcctgctttttgcccattgagaccaaaggcggaggactgcaggagtccagccaccgggagtggggccaggagatggtcggccgaggaatgcacggtgcaggtgttaccaggtcgaactctggctctcaggaactcgagtctagagggcccttcgaacaaaaactcatctcagaagaggatctgaatatgcataccggtcatcatcaccatcaccattgagtttaaacccgctgatcaacctcgactgngccttctanttgccagccatctggtggttggccctccccgtgcctttcttgacctggaagntgccacttccactgncttttctaataaatgangaattgcatccattggctgaataggggcaatctatttttgggggtggg

SEQ ID NO: 1980 - DNA, 506 bp, Homo sapiens
  misc_feature (1)...(506): n = A,T,C or G
tggtctgtgtaggcntgannnacanntccacgctntggggaaatattttagaccannnccnanggaaancangnctgaagatcaacgggctgtggactctgtnctatgnnnttcttagtgcataccgcacccgnntntngntggatcctgtnnctccggagnctggacgggcttctatatcggagganttccccanctatgtgactctgaatgcgcnagttccttnccatgaaagccatagctatatgtattttgctgatgngangtattctgggccatccngacantgntcgaggtcgtnctgactgtgatncgtgatgcccancctgggcttggccnttggctgctnatcctctcaaattgtcnccntnnncttcttttgccgtgctgtgnttctggctgcctgaaagtgcaaggtantnatgngctgtcaagggaaccaggannangcaatcgccaccttaaagaggattgcaactgaaacngagctcccatgccgttgggga

SEQ ID NO: 1981 - DNA, 458 bp, Homo sapiens
  misc_feature (1)...(458): n = A,T,C or G
nnncnaattnnagccccccgcggtggcggccaaggtacccactttcaacggatttcttcttagtcaggaccctgagtttgggtggaggaatgtcttcttcttgctgttngccgtnaacctgttaggactactcttctacctcatatttggagaagcanatgtccaagaatgggctaaagaagaagaaaactcactcgtttatgaagttatcccaccttggatggaaaagtcattaggcaccgtattgcataaaatagaaggcttccgtgatgaaaataccagtgaaaagatttttttttcctgtggctcttttcaattatgagatcagttcattattttattcagacttttttttgagagaaatgtaagatgaataaaaattcaaataaaatgataactcaaaaaaaaaaaaaaaaaaaaaaaaaaacctccccgggcggccgctctagaactaggng

SEQ ID NO: 1982 - DNA, 459 bp, Homo sapiens
  misc_feature (1)...(459): n = A,T,C or G
actcagatcaacaccctacattcataagcaatcaaagtataactttttcatcccccctttaacacctacttcttaccttcacccccttcattgtgttaaatctcatacaagtttggcaagccctgcccctcattttgtttggggttttgggcctgagtgctggggctgtgacccttctacttccggagaccaagggcnttgctctgcctgagactattgaagaagcggagaacctgggaaggaggaaatcaaaggccaaagaaaacacgatttaccttcaggtccaaacaggcaaatccccacatacctgacagggatgccgtgtcaggagctgagtggagagaggaaggaggactggccacttggaagattcctagaagcctttgccttcccagacacttctatatattcaaccaggttccaaatnaattcccaaaccttaaagacttntnngaaaaa

SEQ ID NO: 1983 - DNA, 447 bp, Homo sapiens
acgcgtccgctgatgggcaggtccactgagcttgaaaccatcacagcactaggaatatcacagatgcataataaatgttgaggcttggaggcatggagattaagaaaaccgttgaaagccaaacctgacaacacaacataggagctgctaatttgaggttctacccattcaaaagcaaatacttacaaagcaagatacctgggagacagtgagaacagacaatgcagtgtcaccttgcatccttacatgtgatgtcctggctacaatcctgcccgttgtccttggtttgtgtgcaagccttggtgtattatggccctaactctgagtgcgggtgatctaggtggaagtattttatgcccaacctggcccctgtcttggccctcatagagattccatcttacccctctctgtatctaccttgatttaaccaaaaaatggttttggtcg

SEQ ID NO: 1984 - DNA, 2494 bp, Homo sapiens
atggacgccgcgttcctcctcgtcctcgggctgttggcccaggtaaggcatcggcacctgcgggggtccccgctgcctccctcgacgctgcgggacagtgtcttcaactgcagccgcacaggtctcccccagaaccactggccctggtcgcctttgggggcctgcctcccagctccagctggctccaatttcagcccctggcagctgaccaagcgcctggccagccagaccctccagcagctgcccatgagggcaccacggatcctgccacccccgactcccccatctggagacaaggggctgggggacaataaccccctcccccgacagctggaggctgggggaggtggtggaggacggctcccaggccctccctccactggccacgtcttctgggacggggatggggtgggaggacaaagagccagctttgagaacgcccccgagagccggaagtgggccgtggccaacctgctcacccacacccacattggccgggatctgggcaacgtgactggagggtctccggtgaaggcagctggagccctggcccctgctgccctcaccaagttcacgccccaggagcccgccctggtccaggccccgccccgtcccgagcgcagcctgcgaccgatggagcaggaggcgcgggtgctgagagctgcgggcggctttggccgggcccggcgcctgctggcctccgcctcgtgggtaccctgcatagtgctggggctggtgctgagctccgaggagctgcttaccgcgcagcccgcgccccactgccgaccggaccccacgctgttgcccccagcgctgcgcgccctgcgcggacccgcgctgctggacgccgccatcccgcgcctggggcccacgcgagccgcgagcccctgcctgctcctgcgctaccccgatcccgcgccctgcacccgccccggcccgcgccccgcgcccgcacgcaacggcacccggccctgcacacgcggctggctctacgcgctgcccgggcgccggcctcctgcaaagcccggtcacccaggcctggagttgtgtgaccctccccaccgcctggccttctccatgggggctggccttttctcggtggtgggcaccctgctgctgcccggcctggctgcgcttgtgcaggactggcgtcttctgcaggggctgggtgccctgatgagtggactcttgctgctcttttgggggttcccggccctgttccccgagtctccctgctggctgctggccacaggtcaggtagctcgagccaggaagatcctgtggcgctttgcagaagccagtggcgtgggccccggggacagttccttggaggagaactccctggctacagagctgaccatgctgtctgcacggagcccccagccccggtaccactccccactggggcttctgcgtacccgagtcacctggagaaacgggcttatcttgggcttcagctcgctggttggtggaggcatcagagctagcttccgccgcagcctggcacctcaggtgccgaccttctacctgccctacttcctggaggccggcctggaggcggcagccttggtcttcctgctcctgacggcagattgctgtggacgccgccccgtgctgctgctgggcaccatggtcacaggcctggcatccctgctgctcctcgctggggcccagtatctgccaggctggactgtgctgttcctctctgtcctggggctcctggcctcccgggctgtgtccgcactcagcagcctcttcgcggccgaggtcttccccacggtgatcagagggccgggcctgggcctggtgctggggcccgggttcctgggccagaaggctggctgcccccaacacactctgtcccccactgtccccgggctcctcccctccctggctgcctcctcactcagcaaccactccgcctcccaccaacacaccacgtccaacaggcgggccgggctgggcctggtgctggggcccgggttcctggaccagccacccggccccctggacaccctgcacggcggtcagggcttcttcctgcaacaagtcgtcttcgcctcccttgctgtccttgccctgctgtgtgtcctgctgctgcctgagagccgaagccgggggctgccccagtcactgcaggacgccgaccgcctgcgccgctccccactcctgcggggccgcccccgccaggaccacctgcctctgctgccgccctccaactcctactgggccggccacacccccgagcagcactagtcctgcctggtggccctgggagccaggatgggaccaaagtcaaggcctggggcatggctgagtaccccagacgtctggtccagggcagacacattcctctcagaagcccgtgtctcagtgcaggtggagccgtggggacagcgtgaaggtgtctccagccaggccccaggcactggaggccctgggtctccccccagccacacccagtaggtgtggaggataaaggcttctgtggaaa

SEQ ID NO: 1985 - DNA, 526 bp, Homo sapiens
  misc_feature (1)...(526): n = A,T,C or G
agtttgtattttttgtctatcttccctttatttccactaattttctggcctctatgatctttcattctctgatgtcaacttagtgtagattttttttcttttctggtgtgcttcttatagttgccagcatagggctgacatctcccaagaaagaaatgggctctgtaacttgggggttgaaaatggtgctgcagatggtgctttctccagtgacagttcccacttcccacaatcaggatcgattggcggcctcttctttgcagttggcattgcccaatatgccctgttaggatacttcatccgctcctggaggaccctagccattctggttaacctgcagggaacggtggtctttctcttatctttataaataccttaaccacctagatttttaaactaaaaagccaaacctaatnaggctgaagaggcgctgtacctcattgccaagaggaaccgcaaactcaagtgcacgttctcactaacacacccagccaacaggagctncagggagactggaagtttcctg

SEQ ID NO: 1986 - DNA, 627 bp, Homo sapiens
ctgggcatcaatttcctgggaagacggctgagcctttctattaccatgggatgcacggctttattctgccttctcctcaacatttgcacttcaagtccggcctgattggcttcctcttcatgctgagggctctggtagctgcaaacttcaacaccgtctacatttacacagctgaggttcttatgagtgcatcaatactgggggccctgtgtctcttctcatctgtctgtgttgtatgcgccatttctgcattcactctccccatcgaaaccaaaggacgggccctccagcaaattaaatgaagacctgcaaagctatgtctaccagatgagaaaaatgaattctatcttcagaactgcggtgcatttttttaaaacttggttttacttctgtatgctactcggtaattagtaaagtgatttttttttaaaaggcatatatgggaatggggtaggtaactgtatattgatctcttccttgaggaacaatatataaagtacttttataaaatataatttaagctttcaaaggggtgtgagagggagatggtgggggggaagatggcttttcttcgttgaaatcaagtctgtaaacctttatatgaataaatactaaattttaaactta

SEQ ID NO: 1987 - DNA, 3035 bp, Homo sapiens
  misc_feature (1)...(3035): n = A,T,C or G
gggaccatttggtggtgaaaggaagaaaaacccaaattagggagggggtctggtctcttttttttaaatcacagatttatttttctatcacatgcaaattctctcggtgaaatgctttgtcaaatcttaaaactcaaatggaaaaagcaggccagagaagcgcatcccgtgggtaaaagccaccttgctggcgtggctctccatcactgctcatcacagaaaggaaggtacctggcctgaggtcagggccatccctctgtctgtagcctgaggtagagtgatttcctgagggcagggaagaagtgcaggaaggtgggctgtgacaggttaccacgaaanccttcccaggagacaattcttagagatttttactgtataatttaaagctaactgcttagagatctggataaatattatgtccggactccttgtctaatatttactaacagctatttctaaataaatatggtcccaggaattttaaattaatctttctactcaatttttaaaaagaaatggaaaatggtttatcttagagttttaaaaattgacataaaacttacaaaagagtactttgattaacaagtgtctcatgtgtgatgtataagctgcataatctttgtactggtggacttgaatgccaactaaagtcttattcaagacaccatcctaaactacaacgtagatgcaatgaaatcatccacacagtgtcttcagaagcacacgtggtaagtgcctgcccanaacaccactgtgtcttgagtaccaagctgtaagtggcatcctacacagacagcttaaggcaganccaggcctcatcactagaatgtatgtattcttttcaaaagctgaactagagaaaaagttgaaggcattgaacctgccagtattgtttgcttgacctgatacatcaggacattggtgcctcttgtaccttttggcaaaagtctgttttgggaagaggaattaatggtggtctttctaacttctccatgacagtgaggagagaacatggcagagaccctgtaagtcctgccactgtgccacacgtagggattggagcccgttaggtgtctggcgagggccgttgtgactgtccccttccacaccaggtggttacactcttgggaactgctccttggggctttcgtttttgaagctgtgttggcactaattcttcctggtgatgactcataaaacaaatgttgtttttcacatagttcgcctttgctagctccactgatatttgttccaaagaagcatcccttagtctcaggtataaacagaacaacaaaagccagcgatgccagactcatgattgtgtatatgaagcataccccatgacaaaccaataagatcagtcactgtcagaaatgtcaaagagatgagaaggttgacaccccagttcatgctagatgtcagggccatggcgcggcctctaattccaccgggaaagatctcactaagcaccaaccaaggcatgggtcccagaccaattgaaaatgcagccacataaacaagcaagctggccagggacagccatttgtaagcagctgggacgactgcagtgtctgttactaccctggtgttcagttcggctcagtccagcatttggtaaagacgacgtgaaggtcatctcccctttcggctccatgccattccccatgggcataaacgagcccttgctgtagggagtgattcttttaaagtgctccctgagactgctattgctaattgacaggtttcctgttgcatagaacacaaactcctccagggactggttaagaagactatggcttctgcagatgttggtgaagttcatattgatgttgaggttcacaatgcccatggtcaacagtgaaagcggacatcacggaggaagccaatacagaggaagttttgctgccaatgtggtccacaaggagggttgctgggatagtgctaaccaccttgaccactcccaccccagtggangcaaggctagctgcctcattgctctggaagccaacagacttcaagacagttgatgcgtanaataatatgtttggctgcccagtggtctggacaaaaaataccagtgtcagacctatcaggattctggtcctcatgttgtccttagancgaaacagatcccaaaaactgtactgatactcatctttcaaggaanatttgatcaaagtgagttcttcagtggtgtctganatcactcttaacttcctgaagactttgcctgccgactcctcttgtcccttcatcaccaggaaacgaagacttgggggaagaaagtacatcgctattgcttgcataactcccagggggatcacaaggccaaacatatacttccaaccattggagatgttggcaaatgcataatttgaaatataggcaaagagaataccagtgacaatcatcagctcattcaacgacacaagaagtctttttctgtgttggggggcaatttccgcaatgtacacacacgtggcaatggaagacagggatatggaaacccctatagccactctccccattataaggagcgtgtaggacaaattcattatcaagaccaagcttccaagtcctaggaggcaggatgacaggattatggcgagcttcttccgtacctgtatatgaccacgcatcctgtgagaaaagcgaagaatgcccacatgaagaaggaactcacaaccatttcctgctcctggcaggtcagggataataacgttctgatctgcagaagactccagagatgagcccaagttcataacccaccaggaggccgctgatggctgcagtaacagatgtcaggaacgtaaacatgctgggacctcccgcgcaggcaggatgccctccgccgctggctccacagctgccttcggtctccgcctctctccccttctggttcagcagattggggccctctgtgttttcaacaggtaccatggtcacggtagtacttacagcttctcgctcnccaccngcnggangcgtgggtcaactccctataatgaattccttttaaaattccccccctttta

SEQ ID NO: 1988 - DNA, 1688 bp, Homo sapiens
ctttttttttttttttttctttttgaatagtttaatagttattatttaaataaggctttggcgtgcttttccacatttttaggtttttttctctatgtgtacaccttgcaagatgtatcattaactcatgaaaccaccagctcctcaggcaacgaaaagggaggtagaaagaacgccagaaaggtgggtctgtgtgttctggggtgcgtggggcccgcccccgaggaaggtgccaaccgtccctggagagcagaatcaccaggcctgggaaagccatgcgggttcgagagcctgcgccatggccatgctgggcagggcccaaggggtgcccaggcgtctgcccactgagaacactgttagtgcggagggatccacaggaggggagagcggcgccagggtcccggacacaggcaagggtctctagcccgccacccacccactgccctgggggtctctgtcaggcttctaggagacacagagactctgaggtcgtgtctcgagggtggctacctggggaggctgggcagagtctggagacatttctggctgttgtctgactgggagctgctggctaggggtgggtggaggccagggatacctttaagcatcctacagtgtgcaggacagctcccaccaaggaggacagcccgccagagacacagcaaagtgggctgggattggggaggctgcagcctggtgccagcctcacattggcaggcgggcgctgcaggaggcttgcggagaacacggcgaccgagggaggtttggcgggaaccacgcggaacagatcgtggtgggaatgaggctgcgcctactaacaataaccccacccaccctgacggccacaccagcctgtgaggaggacagggccgagcccgctggcaggtggggaaactgaggcccagagagcagcgagcctggtctggacccaggcccaccccaccctcccaccagctgttgtggactcttcttaaggagcttcaggctccacagtggtttgtgttcctctctgctcgtgtgtctgacatggagtgaccaagtcccacacactgagtcccctgtgtcctggggctgctggcgcctgggtccttggagaggctgtggggttgggagctagaggtcctcatgggtagagctcaggtccaccctctgagcctgtccaaacaccaggaaggtgcacagccccaggttgctgatgatggccacaaggttgaacaggcaagtccaggagcccgtggtctccatcaagtagccgcctagacacacacccacgacacctgccaaggccccggctgtgttggccacaccaaacagaaagccggcgcaggacggggccaagtcctggatgttaacagaaatgccactgtggttgaaggtctggaggccgatggaggctgatgcaaagaccacagactcacagaagctggaggtgtggcccaggcacagagcaaagacgctggagaggccaaggcccatgccctgcatgagcttccgcaccgtgatggctctgtaaccctgattgatgagatgatcagagagaaacccactgaatagactggccggaatcgccaccaaccaaggaaccacgttgaagatccagccctgcaggggggagtttggccttagagggggccagggccggcacctggccatctggaagaggatactcaggctggaccggacgcgtg

SEQ ID NO: 1989 - DNA, 515 bp, Homo sapiens
  misc_feature (1)...(515): n = A,T,C or G
cgacatagccgcaaggctaccatgagcttcggtatcttgctgtggtcaggagctggcctctctagctccttcatctccccccggtattcttggctcttcttcctgtcccggggcatcgtgggcactggctcggccagctactccaccatcgcgcccaccgtcctgggcgacctcttcgtgagggaccagcgcacccgcgtgctggctgtcttctacatctttatccccgttggaagtggtctgggctacgtgctggggtcggctgtgacgatgctgactgggaactggcgctgggccctccgagtcatgcccttcctggaggccgaggccttgatcctgcttatcctgctggattcaaacccaccccggggagctgccagacacaaggggagggggccgtgggaagntttaagaacagctggtgtgaggacgtaaaaacctggggaaaaactggaggtttgtgtggncgaccttngagtgaccgcatgggctttgngactggaccctggggttct

SEQ ID NO: 1990 - DNA, 811 bp, Homo sapiens
  misc_feature (1)...(811): n = A,T,C or G
tcctcagccacgggtctgacctccggcctcctgagtttgttattgccggagacccttaacagtccgctgctagaaacattctccgaccttcaaggtgtattcgtatcgcaggctgggaagaagaagcattatctttacaggctttggacccccaacagtgtgtggaccaangagagctctttanggagtgagagtgaaggaagaggaanaattttatgatgcagatgaagagactcagatgatcaagtaaagacccacacatcccccctaagaagcaaaggatcgtcttttatgcctctggctaaggcaggttcttccatgactcctaagagagttgtaaaaatagaggcttggcttgaatgtacatagatggtacctggcatggacttgatgtttttaggcaaagaagttggagaagagatttcatgaaagacaacatcactgcattgagagaatagttgttaatttgtttagaatttaagttctactcagaatcataacatctggcagaacagcccaaacccacattccaaagtggtaggctcatttgtttctagagatttcatcatgtcgcttttccttcatcatgatctaaataaaggcagatatgttaaaatttctcaccattttggtggggttaagataagctattattaagatttaatccttataccatgttgggacatttgcccctatcagttgctcctccaggaatcttctgggtacaggtttaacatccacattttcattttgtgtcccagggaaaacaccccanaagtcctctgtgtttccccaagacctcccaactttt

SEQ ID NO: 1991 - DNA, 509 bp, Homo sapiens
  misc_feature (1)...(509): n = A,T,C or G
gggcctgncccttgtctctaaggattggcgattcctacagcgaatgatcaccgttccctgcntcctnttcntgtttnatggctggcctggtttgttcctgnagtccgcacggtggctgatagtgaagcggcagattgaggaggctcagtctgtgctgaggatcctggctgancgaaaccggccccatggncagatgctgggggaggaggcccaggaggccctgcaggcttcattgcccatgccattcgccactgctaccagcctgtgggaggaggagggagcccatcggacttntacctgtgctctctgctggccagcggcaccgnanccctggcctgtgtcttcctgggggtcaccgtggaccnatttggccgccggggcatccttcttctctccatgacccttaccggcattgcttccctggtcctgctgggcctgtgggattatctgaacgaggcttgccatcaccactttctnctgtccttgggctcttctcctcccaagcttgc

SEQ ID NO: 1992 - DNA, 470 bp, Homo sapiens
attccaaatgtctttattgaaacagaatgatagagcaagaaataatgaggtctgggtggatgtctttgggcgcaggatggagctccaggcgcatcaggtagacacccaggtcaacaccggcaagcagaaagcccaagaggaatcggagggccatgacgcctgtggaggagcctgcagcagcccctcctactccacaggggcccaccagccccaaggtcagcagcacaatcccgcgacggccaaatctgtctgcggggtaacccaggaacaggtagccggaggcaaagcccaagatgaagaggatctgctccaggatcacctgccagcccaggtcacacaccagatcccactggccgatggcgttggtggtgagcacaggaaggccattatagtcccaatccttgagggcaatggttgaagtccggcggggcgaagccgctgcacgagggggtcggtacttggtggcgaca

SEQ ID NO: 1993 - DNA, 2422 bp, Homo sapiens
cccggggtaagcccacgagcacgcgcacggacccgggaggcgcccgcggctgcagagctgcagagcgggatctcttcgagctgtctgtgtccgggcagccggcgcgcaactgagccagaggacagcgcatcctttcggcgcgggccggcagggcccctgcggtcggcaagctggctccccgggtggccaccgggacccccgagcccaatggcgggggcggcggcaaaatcgacaacactgtagagatcacccccacctccaacggacaggtcgggaccctcggagatgcggtgcccacggagcagctgcagggtgagcgggagcgcgagcgggagggggagggagacgcgggcggcgacggactgggcagcagcctgtcgctggccgtgcccccaggccccctcagctttgaggcgctgctcgcccaggtgggggcgctgggcggcggccagcagctgcagctcggcctctgctgcctgccggtgctcttcgtggctctgggcatggcctcggaccccatcttcacgctggcgcccccgctgcattgccactacggggccttcccccctaatgcctctggctgggagcagcctcccaatgccagcggcgtcagcgtcgccagcgctgccctagcagccagcgccgccagccgtgtcgccaccagtaccgacccctcgtgcagcggcttcgccccgccggacttcaaccattgcctcaaggattgggactataatggccttcctgtgctcaccaccaacgccatcggccagtgggatctggtgtgtgacctgggctggcaggtgatcctggagcagatcctcttcatcttgggctttgcctccggctacctgttcctgggttaccccgcagacagatttggccgtcgcgggattgtgctgctgaccttggggctggtgggcccctgtggagtaggaggggctgctgcaggctcctccacaggcgtcatggccctccgattcctcttgggctttctgcttgccggtgttgacctgggtgtctacctgatgcgcctggagctgtgcgacccaacccagaggcttcgggtggccctggcaggggagttggtgggggtgggagggcacttcctgttcctgggcctggcccttgtctctaaggattggcgattcctacagcgaatgatcaccgctccctgcatcctcttcctgttttatggctggcctggtttgttcctggagtccgcacggtggctgatagtgaagcggcagattgaggaggctcagtctgtgctgaggatcctggctgagcgaaaccggccccatgggcagatgctgggggaggaggcccaggaggccctgcaggacctggagaatacctgccctctccctgcaacatcctccttttcctttgcttccctcctcaactaccgcaacatctggaaaaatctgcttatcctgggcttcaccaacttcattgcccatgccattcgccactgctaccagcctgtgggaggaggagggagcccatcggacttctacctgtgctctctgctggccagcggcaccgcagccctggcctgtgtcttcctgggggtcaccgtggaccgatttggccgccggggcatccttcttctctccatgacccttaccggcattgcttccctggtcctgctgggcctgtgggattatctgaacgaggctgccatcaccactttctctgtccttgggctcttctcctcccaagctgccgccatcctcagcaccctccttgctgctgaggtcatccccaccactgtccggggccgtggcctgggcctgatcatggctctaggggcgcttggaggactgagcggcccggcccagcgcctccacatgggccatggagccttcctgcagcacgtggtgctggcggcctgcgccctcctctgcattctcagcattatgctgctgccggagaccaagcgcaagctcctgcccgaggtgctccgggacggggagctgtgtcgccggccttccctgctgcggcagccaccccctacccgctgtgaccacgtcccgctgcttgccacccccaaccctgccctctgagcggcctctgagtaccctggcgggaggctggcccacacagaaaggtggcaagaagatcgggaagactgagtagggaaggcagggctgcccagaagtctcagaggcacctcacgccagccatcgcggagagctcagagggccgtccccaccctgcctcctccctgctgctttgcattcacttccttggccagagtcaggggacagggagagagctccacactgtaaccactgggtctgggctccatcctgcgcccaaagacatccacccagacctcattatttcttgctctatcattctgtttcaataaagacatttggaataaacgaaaaaaaaaaaaaaaaaaaaaaaaaaaaag

SEQ ID NO: 1994 - DNA, 738 bp, Homo sapiens
  misc_feature (1)...(738): n = A,T,C or G
cgcgtccgcgagtccctccggtggctaatggccacccagcagtttgagtctgcaaagaggctgatcctccacttcacacagaagaatcgcatgaaccctgagggcgacatcaagggtgtgataccagagctggagaaagagctttcccggaggcccaagaaggtctgcatcgtgaaggtggtggggacacggaacctgtggaagaacattgtggtcctgtgtgtgaactcgctgacggggtaccgggatccaccactgctttgccaggagcatgatgggccacgaggtgaaggtgccgctcctggagaacttctatgctgactactataccacggccagcatcgcgctggtgtcctgcctggccatgtgcgtggtggtccgattcctcgggcgcaggggagggctgctgctcttcatgatcctcaccgccctggcctcgctcctgcagctcggcctcctcaacctgattggaaagtacagccagcacccagactcanataagtcggatgagtgacagcgtcaaggacaaattttccatcgcgttttccatcgtgggcatgtttgcctcccatgcggtggggagcctcagcgtgttcttctgtgcggagatcaccccgacggtgataaggtgtggcgggctggggctggtgctggccagccgcgggcttcggcatgctgacggcacccatcatcgagctgcacaaccagaaaggctacttcctgcaccacatcatcttt

SEQ ID NO: 1995 - DNA, 1554 bp, Homo sapiens
caattagatagtggtcgaataggagcagatgaagaaattgatgatttcaaaggaagatcagctgaggaagtagaagaaataaaggcagaaaaagaggctaaaactcaggctatacttttggagatggtgggagacctacctgatgcagatattaaacctccagaaaatgtactgtttgtgtgtaaattgaacccagtgaccacagatgaggatctggaaataatattctctagatttgggccaataagaagttgtgaagttatccgagactggaagacaggagagtccctctgttacgcttttattgaatttgaaaaggaagaagattgtgagaaagcattcttcaaaatggacaatgtgcttatagatgacagaagaatacatgtggattttagccagtcggttgcaaaggttaaatggaaaggaaaaggtgggaaatacaccaagagtgatttcaaggagtatgaaaaagaacaggataaaccacctaatttggttctgaaagataaagtaaagcccaaacaggatacaaaatacgatcttatattagatgagcaggccgaagactcaaaatcaagtcactcacacacaagtaaaaaacacaagaagaaaacccatcactgttctgaagagaaagaagatgaggactacatgccaatcaaaaatactaatcaggatatctatagagaaatggggtttggtcactatgaagaagaagaaagctgttgggagaaacaaaagagtgaaaagagagaccgaactcagaaccgaagtcgtagccgatctcgagagagggatggccattatagtaatagtcataaatcaaaataccaaacagatctttatgaaagagaaaggagtaaaaagagagaccgaagcagaagtccaaagaagtccaaagataaagaaaaatctaagtatagatgaaagatgaagaggcagaattgagaggctaacatatttactcttgtctaacttaagagtgccaggaaagcagatgcttagattttgtgtcaaagcttgttatttttttcatactaggattatggtctttagattaatactgattatatagagcacggaaagataaagaattgaacattttctttgtatacttttttacactaattttattgttatacataaatggtagtcttcatttttgaagtcttacattttcactctttttttaatgaagtatttcatactacaaaaatacataaacgtatatataaagggataataaatgtaaatatctgtgtactcatcagccagcttaagatacagatgttgtcgacattttagaagttccctaaggccctctccctctcaaataattatttggaattttgtgtttgtcatttgtctattatagttttacaacatacgtatgtatctgtaagtgaaatgttaattttgtatgtttctgaattttatataaatggcaaaatgtttacttctgtgactttctttcatttttattgctatatagtattatataaatatactacaacttattcattcttgatggaaaaaaaaaaaaaaaaatatagc

SEQ ID NO: 1996 - DNA, 1008 bp, Homo sapiens
tttttttaaataaaatagaatgtatttctctccatacgacaatcttaggatagtccagggcaggtaggcaattccgttccacaaggtcataaggagaacaggctagaggagcagccctctcttccttaacatgtaatttctgaattttggtcccagtgagtcctgtacttttcatcatttccgagccagagagaagagggaaaaagaatagaagacaggcaaatttctcataaaaataaaatccagaaggcacacatttcacttctgctaacatctcattggccaaaacttagaacctggctatagttacctgcaaaggaggctggaaatgcagtctctagctaagcaatcatatgtcagaaattggcatttccaaatacccagtggatattcatcaggatatacaaatgagaagttggaatacctgggaattcttagaaatttctgaaataataatttatccttttaaaaaaaaaaacttttattttaggttcagggatacatgtataggtttgttataaagataaactcgtgttattctgaaaagacttccatttgcagacatcgctgctgcccagaactccctgccaccagccatggccaaccccactgtgttcttcaacattgcaattgatagtgagtccttgggctgcatctccttcaagctatttgcagacaaagttctaaagatggaagaaaatttttgtgctctgaacactggagagaaagtatttggtgataaaggtccctgcttttacagaattattccggggtgtgtgtcagggtggtgacttcacacaccataatggcactggtggcaagtccctctacagcaaggaatttgatgatgagaacttcatcctaagcatacagctcctggcgtcttgtccacggcaaatgctggacccaccacaaatggttcccagtttttcatctgtactgccaagacagaggatggatgacagcatgtggtcctttggcaaggtgaaagatggcatgcctcgtgcc

SEQ ID NO: 1997 - DNA, 314 bp, Homo sapiens
  misc_feature (1)...(314): n = A,T,C or G
tccgggcaaaaataaaccacagganattttccattctttaaagccaataatcagtacatggcatgattattggggtgctgattatgggacctacaattacaacccttacatttggaggtctgggaattcctgnaggcanagccnccagtcanacactgatgaanancggnatcacagacagtttagcgtttcangctctactcaggnncctgnnaatgctcgcctannaaggttgggacttntannnagcaagcngaactngatgtttggaaaaatggattnttcttacttctgnaagggcaagaattttccca

SEQ ID NO: 1998 - DNA, 265 bp, Homo sapiens
tgccatcaagaggcttatgaaggagcctgaccaaatcctacagtgtcggatgaaaaacatacgaaacatccaggttgatgaacctaattaattgactcggctagggcttattggaccggaaaacccaccatttttatatggcacccttcaaaattcaaaatcaatttctccagcgaactaccggttagaaccaccgaagatcacagttaaaaacagaatctatcacccgaaaattaaccgaattatgagtcaatctatgtgcctg

SEQ ID NO: 1999 - DNA, 749 bp, Homo sapiens
  misc_feature (1)...(749): n = A,T,C or G
cttaaactaacttattaaggagaaaacactcagtagtaacatctagtttctaaccatgctaaatgtgtataatctactttaataactcaatgcaacaaattctgaacttgtaagaaagataaaaatgagtgtatttttagcattacatgaaaggctggcttcactaataaccttaaaagtaacttccataacagttctattcacaattaagtcttctcctaggaaaagaaatacataaagctagtaatgctaaaagtcaaactaatttacaaaggaactaatctcacttccaaaaaagtataattatatgattcaagtttatgcaattctgaacattactgggttactgaaaagttctgaaatgttctctgaattacttttttaaataaaatcacaaaaagtaaagcaggcaaatggcaacaagggacagaaagggacacgaaacttagccaaggtgaaaattagttttcagaaatcaaccacaaaataaaatcttcaaagataaattttgatacattcttaccattgactttccctaatcctggagctttatttttcagcagtgtcacttgtatctgtggaatattggtgatgtttgagttcaaaacgaatttgaagtccacatgtccaaccatacaagctttangtagtacaaattctacttgttgcattgaagttcccatgtantaagtcatntttagtttgggtggtgaaaaaaccctgggctgaaaatttggcatttccagttt

SEQ ID NO: 2000 - DNA, 270 bp, Homo sapiens
atatttcctgggcaagatgtaagtatgaccatagaaaatcctaatgggattttggctctggcatttgtactcccgtaacgtccaataacagtgatcttcatgaatctgcacacgggaggtggtattaagtcatgaagaattagtgaatgagtgcttatatcagttgccactaccaaccgccttccatccacctcttctcctaatgtccaaatgtcaattgacaaagaggccaagtctccacaagtgggaatcaatacatcagtcaacaat

SEQ ID NO: 2001 - DNA, 136 bp, Homo sapiens
tttggtgaatttatcagattaacctttttgtggtgcagatggttctaagtatcaggtgacagggtattctactctttctagtcaattaaaattgataatgcagcatgattcataaactaaccagctgtgcctcctt

SEQ ID NO: 2002 - DNA, 472 bp, Homo sapiens
aaatgtggaaggatgtatggaaaggtcccagctggatgacctcttggcagcactgtgatggacaacactcaagtgtctgctgagggacagacttagaggtctttaagatccactccaatgactaaatgtcacttcttaatatatgctctgcagttcagtttaccctaattctacaaaagctgcctaagccatctatgaaatccacagtacctccacagttcatgatttttctgacagcagttgtggttaaaatttgtctgcttcttaaataatcagccaattgtcctccaataggtacaacgattgtcataaccatgtgtgggactgctgacaagagacccaccttacttattgcaaatccaaagacctcttcaaaataagcaggctgacttatgaggagcaaataaaaggtccagcttctgcaaaaatttgccacaatgattgcataaccggcaaagatgtgaaaaatcct

SEQ ID NO: 2003 - DNA, 250 bp, Homo sapiens
ggtcgacccaagggcgatgagctggccagagatcagggttacgtactggaagctggagtagaagccacgacgttccttggtcgccatctcgctgaggtaagtggcggaggtgccgtattcgcccccgaccgacagcccctgcagtaggcgggcgaataccagcaggatcggcgcaccgataccaatggcttcataacccgggctcagggcaatcagcagcgagccgaagcagtcgacgcggcgtcgacgc

SEQ ID NO: 2004 - DNA, 193 bp, Homo sapiens
tcaaccttaagactatgaagggcgcgataatcccacctatgtcacacagggaggaacacaccatcactccgtggttcctcaccaaagtgaggcacagctcatcattcaccaggcatatcatgagtagttgcatgccgaatcccattcggacaacacacaccatgatgatgattaaccagtgcatgtcacgtga

SEQ ID NO: 2005 - DNA, 405 bp, Homo sapiens
  misc_feature (1)...(405): n = A,T,C or G
ggcacgagcacggtgccgaggtggtcgaacacgggacgcttggcgtgcgcgccgccccggtcggccggcaggtagcgccaggccagcagcagcgccacgccggccagcggcacgttgacgaggaaaatggctggccagccgaagtgcgcgatcagcaggccgcccatcncggggccgagcgtggtgccgaccgccgacatggtgccgagcaggcccatggcgctgcccgtcctggccttgggcacggtgctgccgacaaaggccatggtcagcgccatcatgacggaagcgcccaggccctgcanggcgcgcgcggcaaccagcagccacaaggtgggcgccagcgcgcacaggatggaggcaagggcaaacagcgcaatgccggccagcagcaggcggcgccgg

SEQ ID NO: 2006 - DNA, 508 bp, Homo sapiens
gcttgggccagatggctgcccgtggaggagccatcctggggcctctggtccggctgctgggtgtccatggcccctggctgcccttgctggtgtatgggacggtgccagtgctgagtggcctggccgcactgcttctgcccgagacccagagcttgccgctgcccgacaccatccaagatgtgcagaaccaggcagtaaagaaggcaacacatggcacgctggggaactctgtcctaaaatccacacagttttagcctcctggggaacctgcgatgggacggtcagaggaagagacttcttctgttctctggagaaggcaggaggaaagcaaagacctccatttccagaggcccagaggctgccctctgaggtccccactctcccccagggctgcccctccaggtgagccctgcccctctcacagtccaaggggcccccttcaatactgaaggggaaaaggacagtttgattggcaggaggtgacccagtgcaccatcaccctgccctg

SEQ ID NO: 2007 - DNA, 401 bp, Homo sapiens
  misc_feature (1)...(401): n = A,T,C or G
taaatttgtttaagttctttttagattctggatattagctgtttgtcagatggatagactacaaaaattttctcccattctgtaggttgcctgttcactctgatgatagttacttttgctgtgcagaagctctttagtttaattagtgtgggcggcaatccacccaggcaccgacgcaagagactgagagcaggagctgtctgaaagatggccatatattagacctcccagcagtgacccagccataaatagggattgaaccattgattttagtgactgagattcacataccaggtcccactcagtcacgatggtggagaggaaagagctntctgtcgtacacccagccatccacacagggctnncgtgtctggctcatttgtgttgggggagggtccccg

SEQ ID NO: 2008 - DNA, 505 bp, Homo sapiens
  misc_feature (1)...(505): n = A,T,C or G
ggctcctttctgttgcactctttgtcaaccactttggcaggtgcagntcaatgcttatcataatttgttggctattactggttgccttatgggattctgcagacaagctgagttggttgaaatgctgatcctgggccactagattactggcttgtaatgcggactctgcacaagttttgtgcccatgtacattggagagatctcgcctactcccctttggggtacctttagtgctctcaaccagctggacgtcgttggtattctggagatccagatctttggtctggagttcatcttggggtctgaagagctatgcccagngatactgggctttaccatccttccagctgtcctataaagtgnagcccttccattttgccctggaagtcgtaagtttttgctcattaacagaaaggaagagtactaatgagatccttcagcaattgtaggggactcangatgtgncccaggacatctaggagataagagtgctaggatgatacaa

SEQ ID NO: 2009 - DNA, 597 bp, Homo sapiens
  misc_feature (1)...(597): n = A,T,C or G
cgaccacgcgtccgggcggggttcctgcgcgcggcccgccatggaggtggaggaggcgttccaggcggtgggggaagatgggcatctaccagatgtacttgtgcttcctgctggccgtgctgctgcagctctacgtggccacggaggccatcctcattgcactggttggggccacgccatcctaccactgggacctggcagagctcctgccaaatcagagccacggtaaccagtcagctggtgaagaccaggcctttggggactggctcctgacagccaacggcagtgagatccataagcacgtgcatttcagcagcagcttcacctctatcgcctcggagtggtttttaattgccaacagatcctacaaagtcagtgcagcaagctcttttttcttcagtggtgtatttgttggagttatctcttttggtcagctttcagatcgcttcggaaggaaaaaagtctatctcacaggttttgctcttgacatcttatttgcaattgcaaatggattttccccctcatatgaattctttgcagtaactcgcttcctggtgggcatgatgaatggaaggatgtccctngtggcctttgtct

SEQ ID NO: 2010 - DNA, 243 bp, Homo sapiens
  misc_feature (1)...(243): n = A,T,C or G
ccacgcgtccgcccagtctatcttcatggcaggtatactgattggagggctcgtgcttggagacctgtctgacaggtttggccgcaggcccatcctgacctgcagctacctgctgctggcagccancggctccggtgcagccttcanccccaccttccccatctacatggtcttccgcttcctgtgtggctttggcatctcaggcattaccctgagcaccgtcatcttgaatgtggaatgggt

SEQ ID NO: 2011 - DNA, 317 bp, Homo sapiens
  misc_feature (1)...(317): n = A,T,C or G
tgagaccgggtggtnaaagcaacggaacaggagccngcaatcccctcccgcagccttctacaatgctgatggtcctccgcaggggtccccagggccttcccacccagccngcccccatnccagctactggcctggcccgcagcccagacacccaggctcacttgggtgaagcccacggataagcagatttttccaaatgttgcagtagttgaggagggaagcaaaggaaaaggaggatgtngcagggagagggcangtatnctccacgtctttggggagagagagaggagctgtcngaacaanncccnggagatccc

SEQ ID NO: 2012 - DNA, 311 bp, Homo sapiens
  misc_feature (1)...(311): n = A,T,C or G
acacgcgtccgcnccgctccctgcatnctctncctgnnatatggctggcctggggngntcctggagtncgcacggcaggcatgntagngangcgnnngatngaggaggctcagnntgtgctgaggatcctggntgancgaaaccggncncatgggcagatgctgggggaggaggcccaggaggccctgcangacctggnnaataccngccctctccntgnaacatcctcctttnnctttgcttccctcctcaactaccgcancatctggaaaaattatgcttatcctgngctnnaccaacttcattgccca

SEQ ID NO: 2013 - DNA, 179 bp, Homo sapiens
  misc_feature (1)...(179): n = A,T,C or G
cgcgtccggngcctngcccnggtctctaaggatnggngattcctacagcgaatgatcaccgctccctgcntcctatacctgttttatgggtcagtattacccttcacctgncgnnnggcaatncccatctctgnctccaaactagccctagcccggagacccctcctnttctccaacta

SEQ ID NO: 2014 - DNA, 561 bp, Homo sapiens
  misc_feature (1)...(561): n = A,T,C or G
gacccacgcgtccgctcgttcctgtggggagcctatttctccttgctgacctcgtttgctccttcgtacatctggtttgtcttcctgcggacgatggtgggctgnggtgngtccggccactcgcaagggttaatcataaagactgaatttttgcccacnaaataccgaggctntatnttacccttgtctcaaggtgttctggncttgctgggcttccctgctcatcatttggcctttggccctcctgtnnattccattccccccactcattcagggggtnggncgccttngggcttccatttncagcnggtccgnnacctcccatttccccgggggccaatccattcncttacattccggtgggggcgcttttccaaaaggtttttaatttttcccttggaaaattccttggctcccccggggttgttccaaaantgggttctttccccaaccttggggngtananccanccttncgggggggcnttngncacnccttgggggcnccaaacnnttcttgngggaannccgnccnnntttngcccccatanggaattggaaa

SEQ ID NO: 2015 - DNA, 320 bp, Homo sapiens
  misc_feature (1)...(320): n = A,T,C or G
gtccggtttattcctgaatctgcccggttcaatgtctccactgggaacactcgggctgccctggccactctggagcgcgttgccaagatgaaccgctcggtcatgccggaggggaagctggtggagcccgtcctggaaaaaagaggaagatttgcagacctattggatgctaaatatttacggaccacattacagatctgggtcatatggcttggaatctcttttgcctactatggggttatcctggccagtgctgagctgctggagcgggacttggtntgtggttcaaagtcagactctgnggtggtggtgactggggg

SEQ ID NO: 2016 - DNA, 370 bp, Homo sapiens
  misc_feature (1)...(370): n = A,T,C or G
tcaccctcctggccaattgtgttgcaccttgggnactgaatcacatgagccgtcgactaagccagatgcttctcatgttcctactggcaacctgccttctggccatcatatttgtgcctcaagaaatgcagaccctgcgtgtggttttggcaaccctgggtgtgggagctgcttctcttggcattacctgttctactgcccaagaaaatgaactaattccttccataatcaggggaagagctactgggaatcactgggaaactttgctaatattggggggagccctgggtttccctngtggatgatcctaaggcatatatttttcganccctgccctgggattcatnttatnggagtnttttggncatcc

SEQ ID NO: 2017 - DNA, 404 bp, Homo sapiens
  misc_feature (1)...(404): n = A,T,C or G
gtgctgggaaaggnatgttttgggataagcctaacctgcctcaccatctacaaggctgaactctttccaacgccagtgcggatgacagcagatggcattctgcatacagtgggccggctgggggctatgatgggtcccctgatcctgatgagccgccaagccctgcccctgctgcctcctctcctctatggcgttatctccattgcttccagcctggttgtgctgttcttcctcccggagacccagggacttccgntccctgacactatccaggacctggagagccagaaatcaacagcagcccagggcaaccggcaagaggccttcactgtggaaagtacctcgcttttagaaattgttgccttgcatggagccctttagtcaaagattcctgggaaaggatt

SEQ ID NO: 2018 - DNA, 238 bp, Homo sapiens
  misc_feature (1)...(238): n = A,T,C or G
ccccgaccancactgccngantcctggantttacnntntgagccancggtgtnnctggancccgncaganganctgaactacaccgtgccggacctgnggtctgcgggtgantcctccttcctcanccaatgcatgaagtatgaggttgactnnaaccagagnacccttgactgtgtggacccantgtccagnctggctgcnaacantagccanttgcnactaaacccctgcangcat

SEQ ID NO: 2019 - DNA, 1686 bp, Homo sapiens
  misc_feature (1)...(1686): n = A,T,C or G
acttcttctccccagcccacatcatgaggttactagaggtcattcctagccgatactcttcccccactaccatcgccacagtcatgagcttatccaaaaggattggaaagattggagtcgttgttggtaactgctatggatttgttgggaatcgaatgttggctccctattacaaccagggctatttcttgatagaggaaggtagtaagccagaggatgtagatggggtcttagaagagtttggttttagaatgggacccttcaggtgtctgacctcgcagggctagatgtgggttggaaagttcgcaaagggcaaggcttactggaccgtccttacctccaggaacccccacccgaaagaggggcaataccaggtactccccaatagctgatatgctctgtgaagctgggcgatttggtcagaagacaggtaagggctggtatcagtatgacaagccactgggtcgcatccacaaacctgatccctggctttctgagtttctgtcacagtatagagaaacccatcacatcaagcagcgctccatcagcaatgaggaaatcctggagccgttgcttatattcccttatcaacgaaggcattccgcatcttggaggaggggatggccgctatcccatgagcacattgatgtcatctactttgcatgggtatgggtggccaaggcacntgggtgggcccatgtactatgctgcctcaagttgggcctgcccacagttctagagaaattgcagaaatattacagacagaatcctgacatcccccagctggagcccagtgactacctgaggaggctggttgcccagggaagccctcctctgaaagaatggcaaagcttggcaaggaccccatagcagcaaactgtgattcagccttctgcattttgccatgtatggtggcatctaatttcagtgtgattcattcctaaaatccaaacagatttctctgaagtacaaatgatgattgctgctgttgctgctgctgctggtggtggtggtgctaaatggtcagcaaaagcccctctctgtatcttcctacctcataattctaatggccagatttcaggaatgtgttttctatacctctgacggtacttctatcagaaaaattcagcaaatatgtatttactactgcaagcgttcttctcttttgactgtttgcttggtatagccataacttatacaaaatgttgctaagagaataattcataactccagttgacaacccagatataccttttagcaaatcaacaaaagtggcatggacatacaagtcacacatttcagctgtgtgacggaacatggatncaccatggtgctgtgttgcagcattgctctgactaagaggaggcagccaaagaaggccacatgtcatatggatgtggatataaaattccagaatatacagatctgagaacaatgtagatgagtacccaaggctataattgttttaagttaaaattactgctgattaatacagagtatctttggagtttgataaacttttctaaaattactttagtggtgtatctgtaacacattgagttcaatggttcaaagtgaactatgtagtgtgtgtgtatatacacacnacatatatatatatacatatatatatatatattctatctcaatgaagttaataaaattaatgatggtaaagccaaaaaa

SEQ ID NO: 2020 - DNA, 532 bp, Homo sapiens
  misc_feature (1)...(532): n = A,T,C or G
ccccgcgtccgagcacagcacgtagcagaacgatctanggcaaagcctttggggagcgatttggaggtggcagcgtagaactgctgaaacagatggtctccaagggcttcttaggtcgcaagtctgggaagggcttttacatctatcaggagggctcaaagaataagagtttgaattctgaaatggataatatcttggcaaatctgaggctgcctgccaagcccgaggtctcctctgatgaagacgtccaataccgtgtgataacaaggttcgtgaacgaggcagtcctgtgcctacaggaagggatcctggccacaccggcagagggagacatcggagctgtctttgggcttggctttcccccttgtctcggagggcccttccgctttgtggatctgtatggtgctcagaagggtagtggaccggctacngaagtacgagtctgcctatggaacacagtttaccccatgccagctgctctcgacacgctacaactctanaaagaaagtttaccngtggacagggccttcca

SEQ ID NO: 2021 - DNA, 394 bp, Homo sapiens
ttcattcaaggatagtcatccacatcacttcctgaaaaaaaatgctgctctccttgggaaggtttttcatttcaagccccccgacatttggggaggggttagagaagtaactttttaaaaatggttttttaaaaaaggggaaaaagtgtctcctttttgtagcatctttggagttcaaagtgataaaacctctgtttccaccacccgtcgtttttgtggggggtttaaaaaaaacccttttaatcctagagagattgcccatttgggggagggccttgtttgacaataaacgggggcctttaaaaaattcgaagaagaagttgttgtaactcccgccgtgtctcctggttgacaaaccccccagaggtaaaggggcgggaaacacttgcaatcc

SEQ ID NO: 2022 - DNA, 193 bp, Homo sapiens
tctgtttgatgatgaccaatttgtcgttaaagcatctcgcctctttcacagaattccctcatctgggctttcagtcgtggtaaagatgcgcccaagtacactcaatgcactgacacttacagaccttggtgttccagcaggtcctgcctatggcaagctgaaaattggaatttctcttgtcctggaaaatggc

SEQ ID NO: 2023 - DNA, 151 bp, Homo sapiens
tgagaaacgtgaagagcgagaatacagattcggtaacactgtccacgatattgtaaacagaggaggcagggggcacattcatgtcgatggtcttggaatggcttaggggctgcacttgattctagatgggtacagggagaatcacccagaa

SEQ ID NO: 2024 - DNA, 531 bp, Homo sapiens
  misc_feature (1)...(531): n = A,T,C or G
gaattcggnacgagccctnncccnacatcaagcatgtacagctgccaacattcagcaatgttgatccacccttncggcaaactctttaacccccaganaagtaaagccaaagaccnngnggcaagaaaccatancccttgctccaggattaacggcccgcttaaatncacaaccatcgcggcgaggatcaacggaaccgtgantaaatgtcaccaagggaattgntaatagatttgcaataaacgtggtcagactaatgncntgaaatatgntcgntttgcacgngnatnngcnnnaagtttgattccnagttncagatggnttagntgaaanatattnnacggtattancngtgnannntggctacnnagggcagagtnaannattgantcccaanagnttcaatnctgggacnttntggaaggnnggctatanactttcctgantgattggacagggtcatcancanatttccggngcncatnnnntcatccngcnnttnattgtgcgattaaattagnttnnangttg

SEQ ID NO: 2025 - DNA, 139 bp, Homo sapiens
cgctgctgacgcagtactctctgacacacactactctaaccacacgagagactctgcctaagacctacatcttagctttacagatcacattcgctatacctagatagaacttaccccaaacagtcacatacgatgtgtc

SEQ ID NO: 2026 - DNA, 226 bp, Homo sapiens
ctgggatcatatacaacggtcccttattccagcctacgggccgcatggtgtccactggctatgcctcatctgcacgctgatgcaacgaatgatgcctgactctgatgaaggatgtgccagtgaactcctctgacacggcggcagacactgcgggctctccgatgctgaacttctaattgggatcagctatctttacccggctggagctaatggcagagcatatgtg

SEQ ID NO: 2027 - DNA, 181 bp, Homo sapiens
cgcctgcgatcaaaaccatgaacaaggaggctcctacgacggggcccgcgtggtaacaccaaaacttgccccgggaaacttccttggccgcatgaaagttgatcgttggcctaatgttcgggctttggggccaaactgcctcgggggacagcatgtaaactgctgatatggtactaaattt

SEQ ID NO: 2028 - DNA, 130 bp, Homo sapiens
ggaccatcttctccctcactctcatgaagggcttgttagccaactcctctgccaccgtggatggcactgcgggctccccgatgctgaacttctccttcggccatgccatgttctcccggatggcggcatt

SEQ ID NO: 2029 - DNA, 477 bp, Homo sapiens
  misc_feature (1)...(477): n = A,T,C or G
acgcgtccgaaactctacccgcgttttcgatttctgcgctttcttcgagtgaggcaacgacctatgcagaggcccaagcccgtccctccctgccaggagcagcctcatgcggaccgagccgctgtgcggggcatcccctctgctggtgcccggcgacccctactctgtggtggttctgctgcagggctacgcggagccagagggtgtgggcgatgccgtgcgcgccgacangctccgtgaccctggtcctaccccagacccggggcccggcctccagccaccgagagtccccgcgcgggagtggcggcgcanaggccgccctggaggaaggcggcccgtggccccatcctggtggacaccgggggcccctgggctcgggaggcgctgctgggggcgctggcggggcagggcgtggccccgggagacgtgacgctagtggtggggacccacgggcattcggatcacatcgggaacttg

SEQ ID NO: 2030 - DNA, 404 bp, Homo sapiens
  misc_feature (1)...(404): n = A,T,C or G
cgtccgaggaccgatggttgtgtttgcncgcccggaatgctgcacgctgggcagnccctgcagatcttccggaaatgggccgnaaacgaaaagaacatggtcatnatgcccggctactgcgtgcagggcaccgtcngccacaagatcctcagctgggcagcggaagccccttctgaggacccangcaccaaggtgctgctggtctcctggacctaccaggacgaggagctggggagctnnctcacatctctgatgaagaagggcctgccccaggcccccagctgaggcnggnaactcacccagccgacacctctgacctntnccagctggacagaccctgggcctgcacttcaggactgtgggtgcccngngtgaacagaccctgcaggtcccatccctgggga

SEQ ID NO: 2031 - DNA, 317 bp, Homo sapiens
gccgcgtgcacctgcatgacacacgcaaggagcaggagacggcattgcgcgtctacagccacctcaagaggccgccgccccttctgagggcccaggcaccaaggtgctgctgggctcctggacctaccaggacgaggagctggggagcttcctcacatctctgctgaagaagggcctcccccaggcccccagctgaggccggcaactcacccagccgccacctctgccctctcccagctggacagaccctgggcctgcacttcaggactgtgggtgccctgggtgaacagaccctgcaggtcccatccctggtgaca

SEQ ID NO: 2032 - DNA, 704 bp, Homo sapiens
gcgtccgctggccgtgccctactggacgctgcctgctgtgtcgaggggccatgtgcccagggctcctgccttgtgtccccctcaggtgctgatacctgcgttcgcgctgggccgcgcccaggagctctgcatcctcctggagaccttctggtaggtgccgccaggacggctctttaaggagcccctggcccggcctgaacacagtccagttggtgggcagccctgtccagcgtagcggtggcatcttggccctgcttgctgctgtcctggggggccgctcgtgtgctgtgtgaccccaggaagcctgtgacatcccgtcagcgccaccgtgtgcggctcttgtaggggttcctggttctccgctgagcccggctgctgcagggcttaatgggacaagtggtcgcgactggactcaacctggcccgtgcgtgggctgtgcagacacgggtgttgggggtgacccggccgagtcctgccctgcagcattctcccctgtggccactgtgctgactgggccggtggtccccagggagcgcatgaacctgaaggtgcccatctacttctccacggggctgaccgagaaggccaaccactactacaagctgttcatcccctggaccaaccagaagatccgcaagactttttgtgcagaggaacatgtttgagttcaagcacatcaaggccttcgaccgggcttttgctga

SEQ ID NO: 2033 - DNA, 2169 bp, Homo sapiens
  misc_feature (1)...(2169): n = A,T,C or G
ccgacaccctaccccgactcctcccacgggtccggggagcgcggcggagacgatgcctgagatcagagtcacgcccttgggggccggccaggacgtgggccgaagctgcatcctggtctccattgcgggcaagaatgtcatgctggactgtggaatgcacatgggcttcaatgacgaccgacgcttccctgacttctcctacataagccagaactgccgcccaaccgactccccgaactgtgcgatcattacccacttccacctggcaccactgcggggcactcccctacttcagcgagatggtgggctacgacggccccatccacctgacccaccacaccccgcccacccgccccatccccctcgctccccaccccccaatcgccccacacacgaatggcgcggctaccgtccccccccccccccaccccccaccccgcttctgtcagggaccagccttgggcccgccctgtcctccacaggtagatgatgagctggagatcaaggcctactatgcaggccacgtgctgggggcagccatgttccagattaaagtgggctcagagtctgtggtctacacgggtgattataacatgaccccagaccgacacttaggagctgcctggattgacaagtgccgccccaacctgctcatcacagagtccacgtacgccacgaccatccgtgactccaagcgctgccgggagcgagacttcctgaagaaagtccacgagaccgtggagcgtggtgggaaggtgctgatacctgtgttcgcgctgggccgcgcccaggagctctgcatcctcctggagaccttctgggagcgcatgaacctgaaggtgcccatctacttctccacggggctgaccgagaaggccaaccactactacaagctgttcatcccctggaccaaccagaagatccgcaagacttttgtgcagaggaacatgtttgagttcaagcacatcaaggccttcgaccgggcttttgctgacaacccaggaccgatggttgtgtttgccacgccaggaatgctgcacgctgggcagtccctgcagatcttccggaaatgggccggaaacgaaaagaacatggtcatcatgcccggctactgcgtgcagggcaccgtcggccacaagatcctcagcgggcagcggaagctcgagatggaggggcggcaggtgctggaggtcaagatgcaggtggagtacatgtcattcagcgcacacgcggacgccaagggcatcatgcagctggtgggccaggcagagccggagagcgtgctgctggtgcatggcgaggccaagaagatggagttcctgaagcagaagatcgagcaggagctccgggtcaactgctacatgccggccaatggcgagacggtgacgctgcccacaagccccagcatccccgtaggcatctcgctggggctgctgaagcgggagatggcgcaggggctgctccctgaggccaagaagcctcggctcctgcacggcaccctgatcatgaaggacagcaacttccggctggtgtcctcagagcaagccctcaaagagctgggtctggctgagcaccagctgcgcttcacctgccgcgtgcacctgcatgacacacgcaaggagcaggagacggcattgcgcgtctacagccacctcaagagcgtcctgaaggaccactgtgtgcagcacctcccggacggctctgtgactgtggagtccgtcctcctccaggccgccgccccttctgaggacccaggcaccaaggtgctgctggtctcctggacctaccaggacgaggagctggggagcttcctcacatctctgctgaagaagggcctcccccaggcccccagctgaggccggcaactcacccagccgccacctctgccctctcccagctggacagaccctgggcctgcacttcaggactgtgggtgccctgggtgaacagaccctgcaggtcccatccctggggacagaggccttgtgtcacctgcctgcccaggcagctgtttgcagctgaagaaacaaactggtctccaggctgtcttgcctttattcctggttagggcaggtggtcctagacagcagtttccagtaaaagctgaacaaaagactaaaaaaaaaaaaaaaaaaaaaaaaaaaannaaaaaaaaaaaaaaaaaaaaaa

SEQ ID NO: 2034 - DNA, 985 bp, Homo sapiens
  misc_feature (1)...(985): n = A,T,C or G
tttttttggcctttcaaagctttattcatagttcggaggccccgtgtgccccacttcccagacacccaggtctcggcgcccacacaggccccactgagtggtcctgtgtgtccacccgggaagcaccaggttgcccaccctccgaggctgggcagatggctggccagggcctcgaagaaggttccagaggtggccctcatgtgggtccagctggccgaggtcacgaggagggacgcaggccccagccctgtgagggtctgggtggctcagtcgtgtggggctgcactcaggagcccccactgcagcgcaaggagggcccgcgcctgtggctgccgcggctcgcccgcctgttcgaagcgcgcccgctccttgcatagcgcctccaggacgtcggcggggaccgccttgcccgtgaacttgcgcaccggctcctctctgcagggaggggtgcagtgaggcgcagggcccgctgcccacgcgggagcatggcgccgaggggtgggcgggcaggcaggcacttaatgagcagcctcccccaagccagagatgctcactcagcccaacacgcagtccccagatgccttcctaagggtccacgtaacggtggaggccccgggacaacagccatactcacgccacccgcaggaaggggttgtagaggcgctcctcgcccagagtcgacggcacagtgggcacgtcatcctcatccctcttcttagcccaggacagcttggctctcacgtggtcgttgcagggctccactttctggncaaactccaggttgctaagcgtgtgctcgtggccgcagaacaccttcttcacaaagagcactctacacagctcacccatgctcacttacatctgctgggcgctgccctccaggcacgagccgcagccggccaccgacagcgcgtcgcctggcgggggagggcgggtcagagcagatggggcggggccggcgggaggcggggtggcgcgctccgcg

SEQ ID NO: 2035 - DNA, 463 bp, Homo sapiens
  misc_feature (1)...(463): n = A,T,C or G
tgatcctcactcaaggtctggcccccagacccaaacctcagggaaactgggcttgttggggtgaaagccctgaaacctctggctctccatactcgcccgtgttggacacccgcaatgttctgacgagctttcaatctgcttcaatcggtccttgtccacttcctgcttggtgaggacgaagaagaggataccacaggggaaaccgatggcccaggctaaccccacggctttcatggggttcttgcccctctttctgggaatgtattctagctcaggggagaaggggctcgggctcctccttgcatttctggtgagctgtggctctgcagtgctctggtcctgttctgggaagccttgttaactgtggctccagagaggatcccccgaagaacgccggcatttctcgccgncccggcccttcagcgccgtagcagctaccgaccgccgccnatgttcggctagt

SEQ ID NO: 2036 - DNA, 372 bp, Homo sapiens
cctcctgcagcgcatcgagcagctgtccagtcgggtggtgcgcgtgttgggctgcaacccgggtcccatgaccctgcaaggcaccaacacgtacctggtggggaccggcagcaggagaatcctcattgacactggtgagccatcagttccagaatatatcagctgtttaaagcaagccttggttgagtttgacacagcaatccaggaaatcctggtgacacactggcattctgatcaatcttggaaggcattgtagacaattttgtaaaaacatcaataaatgacaccacctactgcattaaaaaacttcgaccggaatcccccagaggagaaagaaattattagggaaattggagaaccagccattttatt

SEQ ID NO: 2037 - DNA, 811 bp, Homo sapiens
ccaccccgcgtccgcaaaatggcggctgccactgtggggcttctgccggccggtagtccctggcgctgctgacccagcatcggcttttctacgtcttgaacctggattcgcctaggggttgggaagggctgtggacggcgttgggggaggcctgacgagattaataaagaactcttcagaattcctggtgtttcatcatatatacgactaagatatcaactcttctagcttgctgtttctggaccaaaaaaaatgacgtctattatcaaattaactaccctttctggggtccaagaagaatctgccctttgctatcttctccaagttgatgagtttagatttttattggactgtggctgggatgagcacttttctatggatattattgattccctgaggaagcatgttcaccagattgatgcagtgctgttgtctcaccctgatcctctccaccttggtgccctcccgtatgctgtcggaaagttgggtctgaactgtgctatctatgcaaccattcctgtttataaaatgggacagatgttcatgtatgatctttatcagtctcgacacaatacagaagattttacactctttacattagatgatgtggatgcagcctttgataaaatacagcagctaaaattctctcagattgtgaatttgaaaggtaaaggacatggcctgtctatcacacctctgccagctggtcatatgataggtggaacaatatggaaaatagtcaaagatggagaagaagaaattgtttatgcagttgacttcaaccacaagagggggagatccatttaaatgg

SEQ ID NO: 2038 - DNA, 536 bp, Homo sapiens
cggccgcgcaaggacccgctgcggcacctgcgcacgcgagagaagcgcggaccgtcggggtgctccggcggcccaaacaccgtgtacctgcaggtggttgcagcgggtagccgggactcgggcgccgcgctctacgtcttctccgagttcaaccggtatctcttcaactgtggagaaggcgttcagagactcatgcaggagcacaagttaaaggttgctcgcctggacaacatattcctgacacgaatgcactggtctaatgttgggggcttaagtggaatgattcttactttaaaggaaaccgggcttccaaagtgtgtactttctggacctccacaactggaaaaatacctcgaagcaatcaaaatattttctggtccattgaaaggaatagaactggctgtgcggccccactctgccccagaatacgaggatgaaaccatgacagtttaccagatccccatacacagtgttagccagagaagaggggtcagggactcttccctggtcgtagctttcatctgttagcttcactt

SEQ ID NO: 2039 - DNA, 783 bp, Homo sapiens
  misc_feature (1)...(783): n = A,T,C or G
cggccgcgcaaggacccgctgcggcacctgcgcacgcgagagaagcgcggaccgtcggggtgctccggcggcccaaacaccgtgtacctgcaggtggtggcagcgggtaccgggactcgggcgccgcgctctacgtcttctccgagttcaaccggtatctcttcaactgtggagaaggcgttcagagactcatgcaggagcacaagttaaaggttgctcgcctggacaacatattcctgacacgaatgcactggtctaatgttgggggcttaagtggaatgattcttactttaaaggaaaccgggcttccaaagtgtgtactttctggacctccacaactggaaaaatacctcgaagcaatcaaaatattttctggtccattgaaaggaatagaactggctgtgcggccccactctgccccagaatacgaggatgaaaccatgacagtttaccagatccccatacacagtgaacagaggaggggaaagcaccaaccatggcagagtccagaaaggcctctcagcaggctcagtccagagcgatcttcagactccgagttcgaatgaaaatgagccacaccttccacatggtgttagccagagaagaggggtcagggactcttccctggtcgtagctttcatctgtaagcttcacttaaagagaggaaacttcttggtgctcaaagcaaaggagatgggcctcccatttgggaaactgccatcnctcccatcattgctgctgtcaaggacngnaaaaccaccacccataaaggaaaagagattt

SEQ ID NO: 2040 - DNA, 215 bp, Homo sapiens
  misc_feature (1)...(215): n = A,T,C or G
ggccccaggagaatnctcattgacactggagaaccagccattccagaatacatcngctgtttaaaagcagtctctaactgaatttaacacagnaatccaggaaattgtgggtgactcacctggccncgagatcattctggaggccataggcagatatttttgtnnaaagccattcaaataaatggacacgtaccctattggcagttaaaaaaaac

SEQ ID NO: 2041 - DNA, 139 bp, Homo sapiens
gctttatggacgaagccatcagcgaaaacgtgctggcgggtaacatcatgagcccgccgtgcgctctactcttacggtctgttactgccgcacaacgcgcaaggcaatgtgggtaatgggcctttggcgtgacgctggc

SEQ ID NO: 2042 - DNA, 375 bp, Homo sapiens
  misc_feature (1)...(375): n = A,T,C or G
gcggacgtatgcgaccaggccttggcatcgcgagtcttggcgcctcgcaacgtgtacagattgtgcatcgtgtgcgtgacgtnctcagctgaaccgagcgctttgaaatcaggcaggtagaacagcatttcggacggggcttcggttcccggagcaagcatgaaggtcactcgcacgccgtcgatcacttcttcgtgtaccggttcggtaatgatgtcggttggcacggcgaacgtcgacgtgccgtgcgaaggtggacaatccgagaccaccggatacctgcccctntggacccgggcgcaggaacgatccgtacatgtacattncgcgacgggtcatngncgtgccggcaaagttacgttcttcggaaatccg

SEQ ID NO: 2043 - DNA, 394 bp, Homo sapiens
  misc_feature (1)...(394): n = A,T,C or G
agttgtgcatttaatattttctataaatatataatctatagctaaaagaaaataccatcttctaaaagcaaaacaagacagaacttcactgatctgtaactaaaggacggctttccatttcttgacaggagttgttgtgtagaatatcttcccatctttctctagttttctcaaatgaagcaagagattatgctctgccatcttatgtaaattctctggaacatccttgtaaatcattgtcctaagttccgttacggtaaatgatttctcaaangttatcaccggaataatgaaataatcctggtccttcccnggtaattcctatgnggaaatatattnccagaanttttaggctccagcattatgggatggacctgggnccatggcccngggt

SEQ ID NO: 2044 - DNA, 1778 bp, Homo sapiens
caggcgggcggcctcctgaaccgaaacgaatggctcctcgggccgtcgtcctcccgcccctcctcgcccgccgccggagttttctttcggtttcttccaagattcctggccttccctcgacggagccgggcccagtgcgggggcgcagggcgcgggagctccacctcctcggctttccctgcgtccagaggctggcatggcgcgggccgagtactgagcgcacggtcggggcacagcaggggccggtgggtgcagctggctcgcgcctcctctccggccgccgtctcctccggtccccggcgaaagccattgagacaccagctggacgtcacgcgccggagcatgtctgggagtcagagcgaggtggctccatccccgcagagtccgcggagccccgagatgggacgggacttgcggcccgggtcccgcgtgctcctgctcctgcttctgctcctgctggtgtacctgactcagccaggcaatggcaacgagggcagcgtcactggaagttgttattgtggtaaaagaatttcttccgactccccgccatcggttcagttcatgaatcgtctccggaaacacctgagagcttaccatcggtgtctatactacacgaggttccagctcctttcctggagcgtgtgtggaggcaacaaggacccatgggttcaggaattgatgagctgtcttgatctcaaagaatgtggacatgcttactcggggattgtggcccaccagaagcatttacttcctaccagccccccaacttctcaggcctcagagggggcatcttcagatatccacacccctgcccagatgctcctgtccaccttgcagtccactcagcgccccaccctcccagtaggatcactgtcctcggacaaagagctcactcgtcccaatgaaaccaccattcacactgcgggccacagtctggcagttgggcctgaggctggggagaaccagaagcagccggaaaaaaatgctggtcccacagccaggacatcagccacagtgccggtcctgtgcctcctggccatcatcttcatcctcaccgcagccctttcctatgtgctgtgcaagaggaggagggggcagtcaccgcagtcctctccagatctgccggttcattatatacctgtggcacctgactctaatacctgagccaagaatggaagtttgtgaggagacggactctatgttgcccaggctgttatggaactcctgagtcaagtgatcctcccaccttggcctctgaaggtgcgaggattataggcgtcacctaccacatccagcctacacgtatttgttaatatctaacataggactaaccagccactgccctctcttaggcccctcatttaaaaacggttatactataaaatctgcttttcacactgggtgataataacttggacaaattctatgtgtattttgttttgttttgctttgctttgttttgagacggagtctcgctctgtcatccaggctggagtgcagtggcatgatctcggctcactgcaacccccatctcccaaggttaaagcgattctcctgccttcctcctaagtagcttgggactacaaggtgctaaccaccaaacccggctaaatttttgtatttttagtagagacggggtttcaccatgttgaccaggctggtctcgaactcctgacctggtgatctgcccacccaggcctcccaaagtgctgggattaaaggtgtgagccaccaaaaaaaaaaaaaaaaaaaaaaaaaaaaaaaaaaaaaaaaaaaaa

SEQ ID NO: 2045 - DNA, 530 bp, Homo sapiens
gcggccgcagacagacgcgcctctagcatagccgcgctgaggctcaaggccaaggagcacgcggcgcagctcacgcagctcaacatcctgccgggcaccagcacgggcaaggaggtgtgctaaaggctgccctccacacccgcgccccgcgcgcgccccgaaaggtcacctcactcagcaccactcaagaccaaatggaaacagaggaccagcacactcccgagacggcactgagagagcgcagccgccttcacagcagtctggatgcgggcatggcagccctcggcgctccgggacgtggcacctcctcggctggctgtccacccgcccctgcccctgcccctgctactgccaacctcgctccaactccaacatccactctctcttgttcttactttcctgaaaatatcggggaggttttctcccccagacgcctgatattgaagtaaaaaatttaaaaagcccaacctcttcctcctgacaccccacttagcctttcttttctttctttctttctttctttttttttt

SEQ ID NO: 2046 - DNA, 1161 bp, Homo sapiens
tttaatcttttttttttttttttttatgtccaattcagtttaaagcactttattaaccacacatacatattttccagtgtctaattctcatcgtgttcttttccattccagacttccctgtctctttcccagagctctgttcctcttctcactgtttctggaaggcagttgcactcaaaagtgaagtcaccagtctgccgacaggtgcctccattgacacaaggcgagggtgcacagggcacatacaggctgtcacagtactggcctgtgaagccctgaaggcactggcactggtaggaaccaggcaggttgaggcaggtgccaccatgctggcagtgtcctggaatgtcacactcattgacatcagtctcacacttctgccctgtgaagcctgtgaggcatttgcaggagaactggttggccacagtggtacaggtacttccatttgcacagggatgagacaggcaggcatcggtccattggcactccttacctgtaaacccgacttgacaggtgcactcataggtatcccggctgagcatatggcatgtgccgccattcaggcaaggtcgagacacaaagcatggatgagatgtcgagtactggcagtcctctcctgtaaaccctgaggcacatcggcacgtggctttccccagcatggcctgggccacacaagtcccaccattctggcagcggttcttctcacaggggtctcgatgttgacaatattcccccaagaagccttctggacatttgcagtatcctgtgccattgtggtaggtaacacacattccttcatttacacagggttcatagccatctcgacactgcaatgcatgcgcgggggtcgcgcagcacagccagagcgccagcagcgcccacagcagagcggggcgcagggcgggtatcttctcggtcgcctcctccgccgccgccgccgccgccgcctgggcagatccacatggggagggggtcccgatagaggagccccactctctcctcccctcctcctgcttcaaaggctcaggccctggcgctacgctccgaagcccagcgcaaatgcctcgactccccgcgccccgagtccgccgctcctcggccgccgcctcagccgccgcccgaagtttggctgaaacccaccggacgggtcgacaccctata

SEQ ID NO: 2047 - DNA, 601 bp, Homo sapiens
ttccagtgtttgaaccatctttatttaatgaattattgatatccttttttgtttccaaattaaaacttcaccacatattttcagctaaggtaaatctgcttggtccaaacaaaacaaaacaaaacaaaacaccagactgcaacaataacaggaaaagatcctcttcagtgatttatgttgttctcttactttcataactagtttgaatgcaaggctggtaaagggatacacagagaatcattattttaaataacaaaagccattcaaaactctctctacctgtcaaggatgttttatgctcccattcttatttgtttggcagtaaacataccttgcccacagtcgccagcatcaaacccacaggacaagacattgcatgcttggtcacagaacttatcagcgagccaggaattcgcacatccctgattacagtaagagacactgtttattcctccaccaaactgccagggctgtccaactccaatactcccagtacctccacctcctgcaatatagcgactccctccactgtttccagagcaatccccaccatcccaatcgcaggctaattattaaaagccttgccacaatatccatcctt

SEQ ID NO: 2048 - DNA, 1648 bp, Homo sapiens
  misc_feature (1)...(1648): n = A,T,C or G
acgcgtccgcggcgcccggcgggcgcgccgggcctggggaaggggcgggcgcggggacccgatgcgcgggagcggaggccgagatggcttcggcgggaggcgaagactgcgagagccccgcgccggaggccgaccgtccgcaccagcggcccttcctgataggggtgagcggcggcactgccagcgggaagtcgaccgtgtgtgagaagatcatggagttgctgggacagaacgaggtggaacagcggcagcggaaggtggtcatcctgagccaggacaggttctacaaggtcctgacggcagagcagaaggccaaggccttgaaaggacagtacaattttgaccatccagatgcctttgataatgatttgatgcacaggactctgaagaacatcgtggagggcaaaacggtggaggtgccgacctatgattttgtgacacactcaaggttaccagagaccacggtggtctaccctgcggacgtggttctgtttgagggcatcttggtgttctacagccaggagatccgggacatgttccacctgcgcctcttcgtggacaccgactccgacgtcaggctgtctcgaagagttctccgggacgtgcgccgagggagggacctggagcagattctgacgcagtacaccaccttcgtgaagccggccttcgaggagttctgcctgccgacaaagaagtattgccgatgtgatcatcccacgaggagtggacaatatggttgccatcaacctgatcgtgcagcacatccaggacattctgaatggtgacatctgcaaatggcaccgaggagggtccaatgggcggagctacaagcggaccttttctgagccaggggaccaccctgggatgctgacctctggcaaacggtcacatttggagtccagcagcagaccccactgaggggctgccgagcctcagggcaggtctcccgcccggcatgtgtgttcagggactgagcctggggacgcccacccacacccactgcttcctctcggcgcaccccaggggagtgttagcagcgaggccttcctcactcaggagtggaaactcagatgtgtcactcagactcaacttgctgggacactgacaggcgttcctgaggttttcagccacttaggctcgttgcggtttaaagatccctctaggtcactgagaaatgccacagaatgtgcaggaagcctgggaggcttctgtgaggaatgtgaggcacattattggggaaattgaggagacagcctagacactggctggcctgatgttttgttgacagtgaacccacagtgggagagagttttttccagtctgatctggttcttacacactcacacacataactcaaaagttttgtgaacaagtactttccttttttacatgttacatgtcctcatgttttctgttttctgtttcataacacaaggctggttgtggcctacaaacctaatttcatgacccagtggtttgcagtccagcgtggcctacacggatatggggagccactgagggatgttttccccccttgcttgtgccttaaaggcagagaagcgaggcgnatgccctggaagcacccagcatcacacccaggcttgtgcggggccagggtcggnagccttncagttagggcagngaggca

SEQ ID NO: 2049 - DNA, 556 bp, Homo sapiens
ttttttttttttttttttttgtagttggtgtttgttatttattgattctccctccaaaggggcctaagctcgacaaaaccgttacagttgtcagaacccagccacagggctcagcccccttcccccacgtcacgtctgcatcactactgtgggtgagcctggacggacgggggctggggctgcccgtggcagcggcaagggatgctttccagagacagccaccacgcaggagggaggatcaccccaggcaacccagacacgggtgttcacatgtgaggctgtgagctccacatagcacaaaggaggcttgctgactttgggcggccatgtctgctgggacctgggtgatccagtgcgtgccacagccagaagcaccattccctgcatatggccactagccaccctggggtgggacagcctgtctagacagacagcaccttgggggctcccctgagggtcagtgagggcctgaccccaggcaggactgcgtggacgctgttctccagccgggacagacctggcctccgctgccttcggacgcgtggtcgactcccaa

SEQ ID NO: 2050 - DNA, 1122 bp, Homo sapiens
  misc_feature (1)...(1122): n = A,T,C or G
aagaaccaattcaacctccaactctgtctcggaagacctaggctgtagacgtggggatttcagtaggaaacattatggatctgtggagctgcttatttccagtgatgctgatggagccatccaaagggctggaagattcagagtggaaaatggctcttcagatgagaatgcaactgccctgcctggtacttggcgaagaacagacgtgcacttagagaacccagaataccacaccagatggtatttcaaatattttttaggacaagtccatcagaactacattggaaacgatgccgagaagagccctttcttcttgtccgtgaccctttctgaccaaaacaatcaacgtgtccctcaataccgtgcaattctttggagaaaaacaggtacccagaaaatatgccttccctacagtcccacaaaaactctttctgtgaagtccatcttaagtgccatgaatctggacaaatttgagaaaggccccagggaaatttttcatcctgaaatacaaaaggacttgctggttctttgaagaacaagaaggctctgtgaatttcaagtttggggttctttttgccaaagatgggcagctcactgatgatganatgttcagcaatgaaattggaagcgagccttttcaaaaatttttaaatcttctgggtgacacaatcactctaaagggctggacgggctaccgttggcggtctggataccaaaaatgataccacagggatacattcagtttatactgtgtaccaagggcatgagatcatgtttcatgtttccaccatgttgccatattccaaagagaacaaacagcaggtggaaaggaaacgccacattggaaacgatatcgtcaccattgtgttccaagaaggagaggaatcttctcctgcctttaagccttccatgatccgctcccactttacacatatttttgccttagtgagatacaatcaacaaaatgacaattacaggctgaaaatattttcagaagagagcgtaccactctttggccctcccttgccaactccaccagtgtttacagaccaccaggaattcagggactttttgctagtgaaattaattaatggtgaaaaagccacttttggaaacccccaa

What is claimed is:

1. A method of forming a window covering from a starting product in the form of a multiple-columned honeycomb structure, wherein the individual cells of the starting product are defined by external pleated sides on the opposite faces of the structure and internal ligaments interconnecting such opposite faces at spaced intervals, the method comprising the steps of:
severing selected ones of the internal ligaments, while leaving others of the internal ligaments intact, thereby eliminating one of the original columns of cells.

2. The method according to claim 1, wherein alternating internal ligaments are severed.

3. The method according to claim 1, wherein the internal ligaments are severed, except every fourth internal ligament is left intact.

4. The method according to claim 1, wherein every fourth ligament is severed.

5. The method according to claim 1, wherein one internal ligament is severed, an adjacent internal ligament is intact, the next adjacent internal ligament is severed, and the next adjacent three internal ligaments are left intact, and such severing pattern is then repeated for successive cells of the structure.

6. The method according to claim 1, wherein every third ligament is severed.

7. The method according to claim 1, wherein the internal ligaments are severed, except every third internal ligament is left intact.

8. A method of forming a single-cell column type of multi-cellular collapsible window covering from an starting product in the form of a double-cell column type of multi-cellular honeycomb structure, wherein the individual cells of the starting product are defined by external pleated sides on the opposite faces of the structure and internal ligaments interconnecting such opposite faces at spaced intervals, the method comprising the steps of:
severing selected ones of the internal ligaments according to a predetermined repeating sequence.

9. The method according to claim 8, wherein the predetermined sequence produces a finished product wherein each cell has only a single pleat on each face of the finished product.

10. The method according to claim 8, wherein the predetermined sequence produces a finished product wherein each cell has two pleats on each face of the finished product.

11. The method according to claim 8, wherein the predetermined sequence produces a finished product wherein each face has a single pleat per cell and the pleats have an alternating variable pitch on the finished product.

12. The method according to claim 8, wherein the predetermined sequence produces a finished product wherein two adjacent single-cells appear between each original double-cell of the finished product.

13. The method according to claim 8, wherein the predetermined sequence produces a finished product wherein only half of an original double-cell pair appears between each newly formed single-cell, and such half double-cells appear on alternating faces of the finished product.

14. The method according to claim 8, wherein the predetermined sequence produces a finished product wherein each newly formed cell has a single pleat on one face and a double pleat on the opposite face, and such cells are oriented in alternating opposite directions on the finished product.

15. A single-cell column type of multi-cellular collapsible window covering formed from a starting product in the form of a honeycomb structure, the window covering comprising:
a plurality of individual cells defined by external pleated sides on the opposite faces of the structure; and
a plurality of internal ligaments interconnecting such opposite faces at spaced intervals,
wherein selected ones of the plurality of internal ligaments are severed to form a finished product.

16. The window covering according to claim 15, wherein alternating internal ligaments are severed.

17. The window covering according to claim 15, wherein all the internal ligaments are severed, except every fourth internal ligament is left intact.

18. The window covering according to claim 15, wherein every fourth ligament is severed.

19. The window covering according to claim 15, wherein one internal ligament is severed, an adjacent internal ligament is intact, the next adjacent internal ligament is severed, and the next adjacent three internal ligaments are intact, such severing pattern being repeated for successive cells of the structure.

20. The window covering according to claim 15, wherein every third ligament is severed.

21. The window covering according to claim 15, wherein all the internal ligaments are severed, except every third internal ligament is left intact.
